United States Patent Application Publication US 2003/0186277 A1 - sequence listing, part 3

SEQ ID NO: 2 - DNA, 3673778 bp, Artificial Sequence (residues 1-1,836,889 of 3,673,778)
  chemically treated genomic DNA (Homo sapiens)
  unsure (379615)
gatttaaaaatttagtttttgaattataattagatatatgtgaatattatagattatagaatattttattattgtagaaagttatattggatagtgttagtttatagttttttttaataaggtttttttatttgaagtatagaaaaaaaaatgatttaaaagattatttttttattttttgaagaggatatatatatatattattaatttttttatatgtagaggagagatgtgaattaattttttacggtggttgttttggggttaatattagggtttaatttttattaaatttgttggttaagtttatttgagttagttttaatattttttatgtttaaagattattttttcgtgttaggattatatgttttttatatatgatttaattttgtagtcgtttttttttttaggttttaggaataatagtttttttaagtaattttttgttaagttatttgtgttagttttagagtttttggtgttttttgtttttagtttttattaagtgagggtttggatggtttttttatatatgattgatatatattattttattatatgtattttttgtttattgattgttatttatgtttatgggatagtgattgggtaggttagatattatttgtaatatagttgtaattttttttatttttatttaatttattagtttttattgttagtaaagtaatatttttttttttaagtagttataggagttagggtttatgttttttttggggaagaatatggaggtaagtttaaaatagatgatttttagatagtttatgatatatataatttataaaatagagttgaaagtgatttttaataattgtgtgtatttggtttttttagatggacggaaggttttttaagaggtgattaggtttttgtttttttttattattataattgattttggaggttttttttggaagtgattagagattttttttgtgggtaaaaggaaatattggggtttggagttggtagagtttatcgtattttatttagtcggtttttatttatcgattttgagtattttttgagtttgtatttttttcgttcgatgtgggtattttcgatgttagtcgataggtgaggtatgttggagatttaggttattgttcgtttagaggttggtattgtggggtttaatgtggatggtgtttgagaatgttgggataaggtatagtgagggcgaatagagaaagaaaaggtgggaaaaagtagggtatatttagagggtaatagtatagttaaaggagacgatagttttagttttattgttttgttgtagtttttattatttttgaatgttagagatgtgagttgaatgttagagaattttttttgttgttttgatttaggatttgatttttatgtttttaagtttttagttggttttattttagttatttttattttatttatggattaattttttttggaatgagagtgttaagagggtttagtgtcgtatttttagtgtttggtatagtatatggtatatagtaggttttttatatatatttgtttaatggttaaaaggaggtaagaagattgtaattttaggttatagattttgttttaattttattttttattttttttttttttttttgttgtgatttagttcgttttttttttgtttttatttatttgtttggtgatggagggttttagttttttatttttttcgttatcgttgttttcgttgtttttaatgttgttttttttgttgaggttttgttgtcgtggacgggcggggttataatttggttttggggattgtaatagattttcgttggatggtcggggtttttgggttgcgttgattgttaattgttgagatttgtttttttgtaatggaggcggttggttttcgttatttttatcgttgtttttatcgtttttatttttaggttttgagggggttggtttttggggattaatggtgatttggggaggggatagtatgtgttgtaggttgttttggagtgaaagttgtcgacgggtgaagttagtgttagagggtttaaatttattattgtagttgtggttatgaaggatggaggtagtagggggtttggggatttcggaagagaggtttttatttttgttatagttatggaatggggtaaaggtgtttttagggggttttttatttcggtggtggtgatggtggtggtggtggtgatgggaggaaggtgggttatggttatcgttttttttatggtcgtttgggggatttggtttattagtagttatgtggaagagagggttttggaaggagagggggattcgtagttgttgggtagggatatcgtttgtggtgatatttatttggttgaggcgtatgttagtcgtcgtgatggatgagttatttttttgggagaggcgttcggtaggcgtaggtcgtagttttaaggttgttgttagcgaggtttggtttgagtgtagtaggttttttacggtcgttaggttcgaaatattgttgttgttgaggcggttattaggtttattattttgtaagtttagtatggatatatttttgttgatatttagtattttttgttttggttttgtgatgttcgagttgttcgtgtagtatgttggtgaggaacgggttaggggtggacggtttatatagaataggtttttattattattaggcggtggtgggggtggtttttttttggttggggaggggaggcgagttatgtttatagagttgttagaagggaagggggtatataagtagaaggtaaggttagggtttttagtaattgaattttgttgtggtttggtataggttttggggtgaaaagtgggatttagagggaagggttgagagttagcggtggtagttttgaagagggtaggtagggaggatgggaggggataggtgagtaaagggaaaggatagggttttttcgggaagggggtgaggtttagaggaggggagatgggggtagtaagagaagggatgggggtagggttgggtatatatggaggagatgaggtttatggaggaggagaggagaggagtagggcgaaggttagtggagtgggagagggaatagataggagaggagaggagggcgggggaggggagagttttttatttgttgaggtttcgagttatgaaggattgaaggtcgatggagttggagagagatggaaagaggggcgagtatagatagagaaggagagagatgtggataaatgaaaggagaggcgggaatggtgggatgggtatggtgttatggaggaagatacgggtagaggaaaaagtagggttattattaaaataatgagtagtaaatgaagtacgggtattatttattagaatggaggttgggattttggagtaggttgtaggttttgttaggtttttgttgttattgttttaagtgttggattatggggaggtttgtggggttgtggtcgggggttgggggaagtgtttatttattagttattattgagatgtttgaatattttgatatatggttgatatgatatgttggttgaattttagtttggggattagtatgggtaggtagagggatagtaaattagagtttgtagtagggatgttttaggtttataattaagtcgtgagttggtggagttttagttttatttttagagttttaaattttttatttttttaggttgtaaagggtttttagtttattattgattgtatttgtttttttatcgttttttttgagaatttggtgtttttttttttttttttttaagttttagagagatgtatgtggggtttagtgaggagtatttagaataggagaagggtttttagggtataggtttggttgttttagggtgtttatttgttgaggtttcgtattatgtagttttgtattttagtcgatggttttcgtagtattataggttgaggtcggggtcgtttattttggcggtttggttgtttttggatgttggggttttttagagttgtgttgatgtcgttgaggagtcggggtagtggatttagttttaggagggttttttggaagggtgaggttgttatttgggggtttagtgtttagttttaagagggtttttgagggtgtaggtggagggggtttgagttgggatagtagtggtgatatttcgagaaataaggggagaaaaaaaatttttaaagggtagttttttaggttttaggaatttttggagttatttggggatagggtaaagaggggatttgttgattttgttgagttggggtagtattttttagagtagggtatgtagtgtggagagttttcggtttaagtcgatgtaatttttaaagttattgttgttggttagcgtgtttagattggagattttatataaaaattgttgtatggaattttattttagttttagaaatttatttatgaagtttagaaagtttttttttgaggtaaatttagttaagaatgtagaagataaaggttatatatatatatatatatatatatatatatatatatatatatatatatatatataaggtattatagtttttttattttaggatttttggggatttaggagattttttttgtcgatttttagttttgttattttttgttttgttattttttgttttgtttatttttgaagttttttttatttggaaaagttggttaggttttggatgattttggtaatgagggtgagggttcgtgaggtttgtttatttgggtatttttgtataagtttaaagagattgggcgatataatcgttgggtagaggaagcgtaggaagagtgaggcgttgataagtttgtttgcgatgttttttcggtttcgttttgcgtagcgtagtcgttacgaagtaaatattttttttagttttttcgggaatacgttggggggaagggtcggggagatagagagagagagagagaaagagagagatcgggattgagttttagagatttttagtttttagggaatatgttgaggggggtggtaggaggtgagggtgtggaaataggggtgagagagatagggaaggagggatcgtaggagtaagatgggaggttgtttgaagaagggggttatggtagagggaatagatagattagggagagagaaatggagggggagagaaggtgaggggagagatacgtgggagagagatggaggggtgtgggagagagataaggagaggaggagaagaaaaatagatattagggagagatagagatgggagagagatggagggttatttgaggtatagggagttcggattttttaatttttttggattttagggaaatggggatggaggtgttttaggtatgatttttagtttttggaatggtttagagtttatttttcgtattttttagttttattttaatgttttattgatattttaaattcggttggtgtaaagtagagtttattatcgtttttatatttttaattggtttttttttttgatttttttggttgttaatgaggttatcggttttttaattattagttttatggttttttgagttattcgtgattttttatagatatgtttttttttttttaataagttgataatttttattgattttttttcgagagggtttttttagtagtttttttttaatttttgttattgttttgatttaggatttgatttttatgttttcgagtttttagttggttttattttagttattttttaatatatatttttttattttattatatatattttatttatggattaattttttttttttgagatggagttttatttttgttgtttaggttagagtgtaatcgtgtgatttcggtttattataatttttattttttagatttaagtgatttttttgttttagtttttcgaatagttgggattataggtatgtgttattatatttggttaattttgtatttttagtagagatagggtttttttatgttggttagtttggttttaaatttttgattttaggtggtttgttcgttttagttttttaaagtgttggtattataggtgtgagttatcgtgtttagtttatggattaattttttaaattataatatttttgatatttttaatggtattttaaggtttattaatgattttagattttttgaggttttttagtttttaaagttaatttttttgtttagatatttttttcgttattttttattatgaggtatatgttttattaaatttgatgtaattgttattaatttattttaatgttttttgaaaatttttgggtttttttattattatatatgtgttttttttatagtttttttttgaaatgttttttttgttaattatgtttatatattagaatttaaattagtttttaaagtttatttaagggggtattttttttttatttattttaaagttttgttttttttttgattttatgttatatagaggttggggggatttttatttagtatttatatattattatggttttgtggtttttttttttttttttttaatttgtttttattttggtggaggttttttgagggtagggattaggttttttttatttgtttgttttatagcgtttagaataatgttttgtttataaatggtgtttagttttttttgaggatggatagatagatgaatagatgaatatataattttttcgattttggttttttagtttagcgtttttagttttattagtgggagttgattattttgtatagggttaatttatagtatattcgtaggttggtttggtgttttgttaaattggatgttgtgtatttgatagggtttatttcgtagttttttttagatttatatagagtacggatgaatttttttggggggtgggggtataagagggtgtggttatattttttaagggtagggaagggggtggttagggttggggaaattttagaattaggtgttggaggttggagttttaggattttgggttaggaagtattaagttgtggaagggtggatttggggtttggggtggatatttggtaggtttgggaagaagagggtttgagtgtgggttatattaatggtatttttgaggtatttttgattaattagttttatatatttttttatggttttagtggtaagcgtgttttcgcggaatatgaggtgttttcgttttatgaatcggtttattttagatatggttatgtttgaaaggaagttttgaggtttaggaaaatttaagtgttagtttttgtataatttaatttcgtgaatttgttttgtttttattaatttttaagtaagtgtttatttttaagttatttttttttgagggtataatatttattttggttttgtttgtattttgtaggatgtgaattagtgtattggtaattttttttttgtttttgatatttagggcgggttttaagattgtatatagtattcgataatggttggtgatatattttgtaaattttttatatagttttatgggtaagatgtttattgtttggtaacgtgtttttagtcgtatagtcgggtaattttttttgtttttgttttttgagttatttttcgagttttttttttttttcgaatttatgtttttagattttttattgtttgttggtagggttatagggtattattgttttgtgaagtggcgtttagttagggtggttattggtatagttattaggtcgatatagtttgttttgttttttttgcgttttttgtttgagttacggtatagatgtagtcgtagggtacggatagtcggtaggttgttaaattcgaagtgttcgttttagaagacggtgtttttagaggtagagcggggtttggaggtggtgcgtgtatatagtatgttatttaggtagagtttatagtagtatcgttttttggggggtagttttcgggtttttatgatttatagttttagtatattgtttattcggcggttgttgttttggtatggtggggtgggtatgatgttaaagggggaagggatagagagatattaaaagaggagagatagtaagaaagtgggatatagatagtaattataaggtgagacggtgtattgggttgaatagtattttattaaaatttatgtttattttgaatttgtgaatgtgattttatttggaaataggatttttgtaaatgtaattaaattaagaagaggttagttatggtattttatttttgtaattttagtattttgggaggtcgaggtgggtggattgtttgaggttaggagttcgagttagtttggttaatatagtgaaatttcgtttttaataaaaatataaaaataaattagttgggtatagtggtacgtgtttgtaattttagttatttaggaggttgaggtaggagaattatttgaatttggaaggcggaggttgtagtgagttgagtttatgttattgtattttaagtttgggaaataagagcgatattttattttaaaaaaaagaggttatattgaattagagtggatttttaatttattttataaaaattggtgtttttatatggagagggagatttggagatatagagatataggatatagagatatatagaaggaagttagttatatgaagatggaggtagaaattagacggatgtagttataagtttaggaatgttaaggattgttggtaattttcggaagttaggaagaggtaaggaaggattttttgttatagtattaaagagagcgtggttttgttgatattttgtttttggatttttagttttttgaattgtgagagaataaatttttgttgttttacgtgatttagtttgtagtagtttgttatagtagttttaggaagttattgtagaagcgtagatatatattagataatataaatagtattggaaagattttaaaagttggaataataagttaaaaatattaatgtagaatttgaagggaattggaaagttttgtagagattattagaaattgtgaaaaaagaattgtatatagaatgggtaaagtttggttagatgtggtggtttatgtttgtaattttagtattttgggaggttgaggtaggtagataatttgaggttaggagtttgagattagtttggttaatatggtgaaatttcgtttttattaaaaatataaaaattagtcgggtgtggtggtgtatgtttgtaattttagttattggggaggttgaggtataggaattgtttaaatttaggaggcggaggttgtagtgagttaagattacgttattgtattttagtttgggtgatagagtgagattttgttttaaaaaaaaaaaaaaaagaattagtaagggtttggggggatataattgagtataagttaatggtaaggtttaggtgatattgtagtgtgttgaaagggaatatggtgtttgtattttgtataggttagattatgttagtattttgggttgagttttttaaggatattaagatataagagttttttttagaggagtgtgattaggattgtaagtttgttagaaattgggatatagagaatagttgatagaattggaagtatgaagttttgggaagaatagatttatagaatttatgtgttaaagggattttagagattatttaatttaatttattgttattagttttttttgttttagagaggaaattaaggtatagaaatttggttaagtgtatttgatgtgttttgcggggtattagtgaagtatttttgtttgtagggaagttagattaaagaatttttagagttttattaattttgtaagtttatgatttttatggtagggaaagagatcgtaaggtagggtagtagtatagaaagcgaaaagaaatgggggatttagaataatgggggtttttttttgtttgtttagatatattgtattttaattttttttttttttaagtttttttttttttaatttatttttttttttaggtttttagtttttcgtgttggtgtaatttttgttttgtataggttgtgttttttttattttttaatattttgttgggttttattgttcgttgtagatttttaatttatttgtttttttcggtcgtagatcgataggtaaagtattttgtttttgatgaagttgttatttagaaaggagtgtggagttgagggaaagggttatagaggggaggagattttgttattttttttttttttttggtttatttttttttttagttttagaagtttttgtttttttgatgtttttatttgtgttattttttttagatttttttgttttttattttttattatttttgttttttggttttttttagtttattagatttagtattttaaaatagaatttttggtttaggatggagttgtgtattggtttgataatggaatttttatttaagttgagttttaatgttttagttgtattgttaggatttagtaaggatttatgagagtgtgattttttaaagttttgtattagtcgggttttggtaggtaggaggtttaggagaggaagggattagggttttttattttttttttttttttttttttttttttttttgagatagttttgttttgtcgtttaggttggagtatagtggtgtgatttcggtttgttgtaatttttgttttttgggtttaagcgttttttttgttttagtatatttagttaattttttttttttttttttttttgtatttttagttgagacggggttttattttgttggttaggttggttttaaatttttgattttaagtgatttagttttttaaagtgttgggattataggtatgagttatcgcgttcggtttttttattttttttagatatataggtattttgtattattagtttgttttaggatggagatttggagagaaggttttttgaatattttttttaaatagatatagaaagaaattttgtttattaggaaggacgtgagggatgtgagaaaaattagaattttttaaggaatttttttgttttatttgggtttggtggtttatatttgtaattttaatattttaaaggtcgaggtgggagggttatttgagtttaggagtttaagattagtttgggtaatatagtgagattttatttttatttaaaaaaaaaaaaaggaaaaaaaagaaatttttattattttatatttaagggattgcgaggattggggatatttagaaatattttaatttagaaatggattatggtagaaaagaaaaaaaaaaaaggagagaataaagtgggtttggggtatttttaggtagtatttttaggtaattttagaaattagagttttagtataaaggaaaaagtggaagtaaagaagtgaaggtatagagaagagatatgtttagtttgggtttggtatacggttagtgtttgataaatatttaatgatttaaagaatgaatgaatatagtataagaggataagttttagtagaagtaggggaaagagtgagggaaaagtataagaaataggagaaagttgtgggtagaaaagagtttaaagaggataaaagatagaatatacggattagggaagaagaggaggtagggtaagaagaagaaagggggagataaaggtatgtgtagtaagatagaggataggagaagaggaggaaggttaattggagagatggtcgggagaatcgaggtgagggttaagaggggatggaatgtaaaaaaattattgtaggagggtagaagataaagggggttaggggtatggaataatgaggggtaggatagtaatataaaagcggtatggagatgggtaggggatgaagagtagagagtagtgggaaagcgggaggggagtttgggtgtgggagtttttaagaagttatttatagtagtttcgttatcgtaggttttggttgtcgttagcgcgacgttttttcggttttcggattttttttttcgttttcgcggttaggaatattatgtttttattttttgtcggttttaaatttagttttggtaatatgggaggggggtagggaaaggtgtgatttattttattttaatttttttatttgtttaattttgggggtggttagatatgggggaaagggagggtatggttttttttggggagtgattgggtgagggggaaatttagagaggaattttaaatggtaggtaataaaggtaaatagtggaggttttttttagtttggttttagggatagtgttttttggattttttcgttggttgtttttttatgttttagtttatgggttgttttttattttgttattttgtatatttgttttagtttttttttttttgttatgttttatattgtttttttttttattgatgaggtttttgagttttagttattatttatttatttagttatttttagttttattttaatttgttgtttttgtattttttgattttttttgatatttttttatttatagtttattgtttatttatttattaattttttttttgtattttttaaatatttttttagggttattttttttttgtatagtttttttgattttgggttagagtttattttttttggtttgaggagtttttgaggagtttttttttggttttatttttattttttttttagtttgtttgtttgttttttttttgttattttattttttttttgttgtttatagatttttattttagtttttttttgttttgttttttgtgttatgatattttttaattaatttgagttgaattttttaatttttgtatatagataattttttttttttgtattttatataggagattttatattatattaattttattttatatgttttagtttttgtatcggttatggttagtatttcggaagcgaggtaggatttggcgaaagttgttggttcggttaagtttgggttgtgatttcgttcgtttgatggagttttttagtcgtcggtttaggaagttttgttgggggggaaatggggatggggtgggttggggtagggttagttttatttatttattttttagttggtagagagtttttggatgaaagtgggatggggaaaagggaagtttttagaggcgaggaaagggggataggaattttaatattagtttgttttttttgtttttacgggtatagtgtaagtatatatatatatatatatatatatatatatagtttggagaaggtgggagggttggttttagaagtaggggggtagagttaagaagggggaaattaaagaggtggggagatatatatagatatatatttttttttttatttttatttttttttttttttttttgtttttttttttagatttttagggttttagttggggttggaggggagggggtttaattgagttatatttggtaggtattatttatcgagggtcggaagggcgtagtaggggtattttttatgttgtattgttttttttttgggatatttttttttttcgagcgatttaagtggtattttggaggggaggaaatggttagaagggaagttggggagggggttagaagggaagttgttaatttaggtttttatttttgattttagtgtatgtttttatttttttttgttttttagtttcggttttatttatttttcggaaagtagtaggaagagtagcgacggcggagaggttggtagcgggaaggagggggtaaggaatttgagtaggagttttttgagggggatggggtgggaggttttaggtttatgattggggttggtagttagtaggggagtatggttgagagggttagtaaaattttagtaatgaaggatattaaagatttagggaggttaggtttttggtgtttatttattttagaaggggttagttggggggaaagatgggttaaaggttattgtttataggtaggttttttttttttttttggtgggtatattttttatttgttttttattttttggaatttttgtttgtttggagggttagggttgttttttatgattttttttttggattggagggggaggttttggaagagatttgtgaagagtagtagggggagaagttggggatagaaaatttaaggaaggggtaggtggggggaagggagaaggagtcggttttacgtgtattgtagtggtaggggtttagaaggttggtggggggaggggaaaagtaaagaatgtaggggaatgggtagggagtaggaaggatggatagtgggggttttcgggatttttaagtaaggatagggaaaggaggaggaggggaggtgaatgcggatgtagtttagtttgttaagagtttagagggatggtaagcgttgaaaaaggaagttgaggttcggttgtaagggaatttagaggggtcgaggggttggaagagaatgtaagtggggggatgttaagtttcggttttagttttagaatggttgtttaggtttgggttttttttttagttttatagttattattgtagttaatgggggggtaggtgttgtatcggggcggggttattatttttacggtaataagaagttataggttggaaggaggggggtggatcggaagagttgtttgttaattttttaggttttagaatagaataagggaggattataattatatttttattgtttgtttttagaattgtaaattgtttgtaaattgttttagaattagtttttagtttttttttatttgtaaaatttaggtgttaggaggtttgtatataaaaatgtggattttatgatacgagaattttattatttttttaggaataggtgtatagtatagaaatatatattgagttatggaggtacgtgtatatgagaattataatatagaaaaataattggggatttatgtgtttttgagatatatagataattgtgagtacgggtatagtacggatttatattttgagattttgaggtttatatattttataggatatatgttttgatatatgtgagttttgtaataagggagtatatatttgaatttagtgatttatatgagagttgttggtgtggattttgtggtttaagttttttgggtaattatgtggatagtatattatagaaatggatttataattttaagatatatatatttttatgtaggggaattttagtttaatttttgaaatatatgtttgagtatattatgattttgattatagaaaggtatttttatattttagaagtataaatatttttttatttacgtgaaaagtataattatatttattttgttttaggataattttttttttttttttagttttttttttattttaatataggtattcgagattgttattagagtaaagaaaaattaggagtaaatgtgttaattatttttttggtatatattaagtaatgtatttaatggtttaggatattttttttttagtaatattttttttgtattttttaggtatggttgttttatttttattttagggaatcgagtttagttattatttttatgtgtaagtttatttaataaaggtataaagtttaattttaaatgtattaaaatttcgttttggaattaaagtattaatagaagaataaatttgttaattggtttgtttggtttttggaagtaatataattttatatatattattaagaattaagatttatgaatttatttataagttataggtatatagaggttatatatatatatgtttattaaatatttttgttgtcgtaggaaaagaatagtagaaatatagaggaaagggggggtagagtgatagaaatatagaatattttgttattaatgttgtatgtagtgatatgtatagagaaaataatatatattcgtgtatatatatatatagtaaatttgaaaagtataaattgtgattttgggtttttatgttttatgtttgtacgatgtatatacgtatgtatatatataatagttatttatataaattcgtaatataggtattgtgtatatatttatatatgtatatattttgtgtatatatataatggtatttatatatatatagtaagggtttggatttttgtttttttaatatttttaattttgttattatttatagaatttttttttgttttttaaatttttaattttttttttggtttttttttttttttatatttagttggtagtttttaaggggagttagaggagggaggttgttagagaagggcgaagaatagggttggatatagagtagagaaatgggagatagagttttgtgttggggatatgaatttttaatgatagtttttgttatgataggttttattgtgagttagttcgtatgtttgagtggttttttttgatttaaaattaagtttgattttgtaaggtttataagaatttagtgtttttttttatttttttttttttttttttttagagattattttattagaaggtttgatttttttttttttattgtttttttagtttttagattttttttttttttattatttttatttagttttttattttaagtttttattttttgtttttttttttaagtttggtttggtttttttttatatttttattttttagttattttttttttttggtttgttgttttttgtttttttttttaagttttttttatttttttttttttattttttttttattttttttttttattttattttttttttttttaagtttttttgtttttatttattgattaagtagggtttatatttgtttagtttaaaggtgttttatatatagtagaattttaaggaatatatttatatatttattttttttagttatattatttatatttagatacgttttggatatttatgttgggattgatatagatatttaggttagtgttggaatatatatgtaaagatatatatttgttattagggatatagaaaattttgtttatagggttatatatttttatatatagaagtttgataggaggtgagttttagttagggatatgtatgtttagggttagaggtgatatggattagtaaggtcgcggattgttttataagttcgtggttggtttaatagttttttaggtaggaaataggtagaggtaagataagataggatatatttgtataaggatggttgtatatgtgtgtacgaggaattgggttttcgtgtgtatatggtatcgatatataggagatacgagtatgggtacgaatatatacgcggatatacgggttgttttttttattaggggttttaagattttatatatatcggtcgttttcgcgtgtttaagattttgttcgtacgaggtcggttttcgattttttcgtttttcgttgttttttttcggttattataattttttttattcggaagatgtagcgagaatatgcggagggagtagttgtcgtcgtcgtcgtcgttatcgcggtttttttattttttttttcgcgtttacgtatacgcgcgttttcgttttacgcgcgcggcgtttttttttttacgcgcgtttttagttcgttcggtttcgtttttatttcgtatcgtttttcgggggggttaggggtgttttcggtgggggaggggtttcgtttttgcgcgggggaagggcggggtgcggagggagagggggcggtacggttcggttcgcgtcgttcggcgcggtgggggcggcggcggggttcgggacggtcgggacggtcgcgcggtgacggtcgcgggaacggtttttttcgtcgtcgttttcgtcgttgtcgtcgttgttcgggtttcgtcgtcgttgttaggcgatcgttgttgtcgtggtcgtttttgttacgagttttgtcgttcggagatagcgcgagagagacgggggaggggggtaaggggatttttaaaataaattaggttatttattatttttttttgagtaggatttttttatatatataaaatcgcggagagaacgagggttcgcggttttatttagtagaggaggagtttaggattttaatgttttttaaaggttcggcgatttttttcgggttggagagtttatagttttagtaaatattttggtattgttaagtttttaaggttttaacgatttttatgtttattgtatattttttatgttttttatatattttatgtttgtttgaagattttaaacgtttatttttattaatttttattaagttttttttttaaatatatatgtttttggaattttttttagtttttattgaattttaatatagtaatttttatatgttattttaattttaaatatatacggtgtttttatttaaaatatacgggagattttcgttagagatttttagattttgaggatttaggataaggagaaagatggggaataagtgggtagatttgttaattataggatatatgataaatatgttttgtgagtatgtgattattttggtttggaaacgtaggtgtatatatatgtatataaatatatatattttttttagatatgaatatgatatatatatatatatatatatatatagatgtgatagatattatatatattttttgtatatattttattattatttgattttgttttatagagatgtgttatttatatatttcgatggtatggggtttttatgataatgatatatatttttgattatttatttatttatttaaggtttttaaatcggtttataaggttagtagggtttggatttattagaaggttggaaggagttaaaggatggggataggttattggttttttaagggagagaaattggtagtttgaatttttgaagggagggggagttggtgggaaaaaggggttatttgggggttggaggaatggggaatttggatcgttaggttcgggaagggaaatgaagtggaagggggtagtgacgagggggttttcgggggttgagggcgtttttttgtattttggttgtagatttttgttttttgtttttatttttttttattgtttttatggaaattttttaagcgaattttttaggaagataaaaatttttttttaaatgattaaagagggggttgggggggtagaaagggggagggaggggaagagatagatggagagagggagagagttggagagatagatcgcgtagatagttttatagatagaaaggagatgagatgggagtttgatggattttcgtcgggagtagaggggagggacggggtaattaagaggggtatagaaaataagagaaattagggaggaaagagaaagggtgatataattgtagaaaatagaagtagttgatgagaggagaaaatagggggtaataaaaggagattttaaggattgaaggttcggaagaagaattaggagtataggggtggggaagaggtttggggggagggtaggaattaggttattttttttaagattttagattaggggttgggaggggtaggggtaggaatatacggattggaagttaaagatttaaggagattatttttataagtattaggaaaatagttaaattttattgttggagaggagaaagggagcgaagtcgagcgaggatttataggggttttttatttatagtttttgtttcgttttattttttagaggagggcgttattttttttcgggaagtaagattttgttttcgttttttttcgttttcggttagttttcgtcgtttttcgacgttttcgtttcgttagttcggtttatttttagtttttttttcgcgtttgttcgggttatgagagtttgttcggtcgtcgtattatgttcgtcgtggggtcgtttttttatcggtacggagattgtgcgttttagtagtttgttgcgattggattcgttttttcggtttcggattagtagggggtgtatttaggggaggtgggggtgtgttagatttttttggtttacgtcgtttttttttttttttttttttttttcgtttttttttaggaagggcgggtttttttttttttttaagtttgtttattttttttgtttcggtttttttatatttggtgattggatttttttttttttttttttagttttttttttttattttttgtcgttttatttttttttttttttttatttgttttgaaatatttttcggagaatttttttaaattttatttagtttttttgtaattttttagaagttagttattttttgaatttagtttttttttgatttttagtttttttattttttttgttttttttttaattttttattttttttattttttttttttttttcgagtttgttacgggggtagtagaagttgtatttataattaggatttatagtttgttttttttttacggttcggtttgcggttagattgggatttaattttttttttcgttagagggtttggttatttttttttattttttatttttttttattattcgatttagtattttttagttttttttttttttttagttattatttttttttaagttttatatttagttttttttgtttatttttatttttatttttatatatttttatttttgtagttttttttatttttataaagagttataggaatagattttttattattttttagttttagttttattatttatttaattttaattttttgcgtttgtttaggttgtttatttttttaattttatttatttttttttttatatatacgttttttttgttttagatcggttatttttattgttttttaatttgttggttattggtttttttagtttgtttttatttttgttatttttttattattttaatttattgttttttttttttatttttataatagtttttattttgggttttagttttttttattttttttatagattttaaattttgatttaggggtttgattatagttatttaaatgttttttaatggtgtttaaaatttagattttttaagttatttttttttttaaagttattatattttttttttaatatttttattttattttgtggtttggaagttgtttatttagttatttttttatatttttatttgtttttataggttttttgatattttagttagttttgatttaaattttaatttttttttattatattatttttaataatttttagggtttattttttattacgtttggttttttaggttattttattattttttaaagtttgttttttaaattatttttattttttgatttatatttgtggggtattattttagtttttattttttattttttttaatggatatttttgttgatttagtttttaaattagaatttatatttttttggtttttagatttttatatttggttattattttttataagaggtttttgttcgttttattttttttattttggttagtttttgtttttattttatttgtatttttttagataattttatatatttttagttttttttttttatatttttttttgatgtttaattatttttttgtagaagtttttttagtgtttttttaaattttgattttaattatttttttagtttttattttattatgttaagatttattgattttagtttttttttttagtattttttagttatttaaaattttttttattttttgttttttttttgcgttttgtaatttttttttttgtattttgttttttgatggagaaaggattgggagttttgtttagtgggtaaagtagagaggggttttgaggattgttttggttgggagggttttttatgtttttattttttttttaaattttttagttttttttttttattttaatttattttataatatggatagtgtgaaaataggagtttttttattttcgaaatttttagaattatattttttttttaatatagtttataatttttaaagattttttgtttaagatgagagaatgattattttttttgttatattttaatttaagttttaatggttatttttttgttatttgtaaatgttttttttttgtttgttttttttgtgttttttttttttttattaatgaggattttttttatttttttatatgcgtttttttagtttttttattatatttattttatttttatttagtatgagtagttggtttttcgagatgatgtagaatcgagggttttaattaggacgattatacggggaatgaacgtattgggttcggtgtatagagggttttcgtatatttggaggatagagatatatagaaatagtaagggaggttttatgtatttggaagtagaggtttaaaatggtaagaagagagtttataaagtgagaaggggattttatcggtttttaggagattatagttgaaagtgagatatttggtaattttaaaggaatataagataagtatttatataaaggggaaaagaggagaggattatattatagaaggttttggagatttgggggaagaaatgtagaggtttagggatgggaattatatgatagagaaggtatacgtttgggggtagagaaagatgaaggagttttttatttattttaggaaaataaggtagaggtgtcgtaaaattggtaggagaaaaatagagaagttggtgttagatatttgggtagaggaaggtatttaaatagttgtagaagataaggatttggaaggtggtattatttttttataaaagagtatgaggaaagttatatggttgtgggaaagaaggatggggtgtgtgtgtaggaatattgggattatgagattttgagggttaaatatttagaaaagaagaagtcggggagtttatttgtttatagttagagatatgagagggtttttttttttaattttttttttttttgtgttttttttttttagtttaattttgtttattttttagggaaagttttggtttttttggtggtaaggagaagatggtttttgtcggtatttggttgtggaggttttagggtagaaggtgggaaatatgtttttgtttggataagtagagattaaatttatttttttttttatttagtgtttagagatttaatattgtttttattattttattttatttagttttagtggataggatggaagttattttataggttaggagtttttttaaggtatagtgaggagtttgaggaagaaagatgttagggggaaagaatggaatatttaggtttggtgatatagaggggtttttaaagataagagttggagatgggaataaaattttgagaagagagaatagtagattaagtgtcgtttatggttgagatgagattagggttttttttttttagttttgttgtttttgttatgtcgttttttttgtaaattgttttttttttaaattttaatgttatataggttttattgaagtaagagagatgttatattggcgatagtaaagagttagaaattaggtttaaggtattagattttagatggaaaaaagattaaattttgttatttttatgggataattatgagtatattgtaggagaattggtttttgagttttattttaatagaatgtattgagtagtagagttttgtaaatttagtttttttttgtttataaatatgttttttaaatttatttaatttttagattatagtgagcgatgaatttttagaatgtttattatttagaaattatatattttgaaattttattttaatttattttagagattaattaatgttttttagatatagagattattaatatttagtttttgaaattatagatattgtaggtaatatgtttatcgtatttagatatttggtatatttagaggagaaatttgttgatatatataagtatttggggaaagggttggtttaggttgtagttaagggaggcgggttagattttagagggtattttttttttggtagtagggaatttaggaataattttagaaatatatatatatatattgtttggatttggtgaagaatgattttgggaggtagatgtaagaggtagagtaatatggttgagaaacgggaaatttttattaggatgagaaattttttaagggttgagatggggattttttgttttaattattaaaatttgtgtttttgtattttaaatttttaatattttaataagtagaggagataagaaaagagaaatgataataagagttgaggtattaagggaaagtgggtaggtatagatttgtggtgataaggaatggtttgggagataaataataggagtagatagaaaaggaggtagaaatgatggtaaatgtttaggggtaagggaatatatttgaagggttcgattggatatgtgttagagtaaaggaggtagatttaatgcggaggttatgagaaggggttaagacggattagtaaagaagtgatagagatataagggagcgattatatagaaaagagataagagagaggtaatgaatattagagaggggattgatataggggaaggatagaagggggatttatataaggaacggatattatatggggggaaagatataggtgatggatagtagaggagggagggggaatggaaataaggattggaggggtgggggaagggggtaaaagtgatgaagtgaagatagtattaagattttagaggttatattttattggttaagagtttttaagagggttagagtttggggtaggattttaatttgttttttatttttattattttattttatttgtattgttatttttttaagtatatataatttggttttttttttgttttggtttttttttttttatcgttttttttttttttttttttttttttatttggattttttatttttttattttttattgtttttttttttttttatttggttttttttttttttttattttttttttttttttcgttttttattatattttgagttttttattaaattatttttttatatttttttggtttttttttttatttttatgtttttattttttttttttagttttttttttaagattttgtttttttatttttttgatgttttttttattatttagtttttatttttaaattatttttgtagttttttttttaatttaatttttttatttttttatttttttttggcgtttttttttttttttattattttttttttagtttttttttaaggtttattttttggtttttttattttttatttatttttatttttttggtttttaatttttttttttcggttgtttttatttttgttttttcggtttttttttttttttttattttagtcgtttttttttttcggtttcgattttttttcgttttttgtttttttttttgttgttttttatatggttttttttttttttttattacgtatttttgaagggggtataggatatcgcggggatgttttttcgatggatggaggttcgagatttgtttattaggtttggggggagggggcggggggacgggggagaaagaagagagaaagagggggagaaagagggggagaaggaggaggaggtggaggaggaggaggaggagagaggaggagagaggagtagagagaagtagagaggaggagagaggaggaggaggaggagaataagagttaacggtagtagcggtagtcgagagagagggggggcgggggagcgagcgagagcgaagagagtaggaggaggaggaggagggagagattttgtagtttttatttttatttcgggaggtttagattgtgagagagagagagatttttgatttaaaaatatattagagagagatagaggttttaaagatgtagattttagattttgagatagagagattttagatttatagagaaagatattttattattttttattgtggggtaatttgagatatagggttaaaatttagaggaaaagagatttttgatttgaggaaaaaacgattttagattttttagagagagaagtttaatattaaaatttgaaaatttagtttaaaaagggttttttatatttatagatattttagattttagattttgagatgatgattttagggattaggatttgagatttagatttagaaaaagatgaggtttagatttagaaagagttagatgtagaattagagtttagagaatttagatttagaaagagattttagatttagattttagagattgataatttagagatagagatatttttgatttaaggggagatagagattttagttggttcggagatggataatttagagatttaaaatttatgaagaagatttcgaaagattttagagtgcgattatagattttgaaatatagaaattttttaaattagaagtataaaaggaaatttaattttaagaaagatttttatataaatattgaaagattttttcgaaatttgttttagagataaattttaaatttaaagatagagattttagggaattttttttttttatttttttgttttagaattttcgagaggtataattttgacgttagtttgggaaatttcgaggtatttttattattagattaatgattttagattttgaagggaggggaaatattgggtgggggtagtggtaagagtttttttttttgtatttttttttatttttttgttttttattggtttttttttttatttttgggttataggatgtgtttgggttttagggaagttatgtagggtaggttttggttttttgggggatgggttagggaaaggagattcgaggttgagaggtggattaattttggggagtggaataggtagggaagaggggatagaaggattattattattgtttttattttgtagttttcgttttttttttttttgatttagtagtttgttttaagttttgggtttttaattaagatggttaggttttatttttattattttttattatagggtttcgttttgttttaaaatgtttttttttttagttagttattgttttgttatgttcgtgtttgtttaattattttttgttatttagggatagcgggtttttagattatcgttgtttatttttaaatttaggtatatttttgtttaattaaaagggtagggggcgtttttttaatttttgagtttggggtgaagggttttttttagatttttttattttttaagatttcggaaatagtgtaggggaggttattaggtatattgtggggtttaaggatgattttttattttatagtttgacgtatcgattttgcggggtttttggttttttttttttggaattagttttcgttttacgtggtttgcgaggttggtttgtgattggttatttggcgttatttattgagtgtcgtcgtcgaagaggatcggtttttttacgtgatagtggaacgtcgtagcggttttttttagttagtaagtggtagtttcgggtttatacggaaacgggcgtgttattttcgcgtacgtttgtagatgcggtagtcgattggttaagttttttatggttttttttttattaggaggtgggtaaatcgcgttatgatagggtcgggattggttggttttggaggcgtaggtggttttttttttattgttatatggtgcgcgttgttttttaattacgtggttgttatttaggtaagaagaggtcgttttttttggggttgttttttcgtgtgacgtgtggtttttgagattaatttttttgtattagcgtaggtcgtatgagtggggggcgggttttcgcggttttgttcggcggagtggtgagtgatcggtttcgtttcgtttttttcggttttcgaagtttcgatcgttattcgtattttaaattttagaggttggttttttgaggtgtgagtgaaatgagtttttgttttattttttaagttttttttttatttttaggggtatttttcgggggtgtattagagggagggtagagtttgaggatttaagcgaaggttttttcgggtgtaattttttgggttgtttgtgaggagagatcgaattcgttttttgtttttaggtttttttgtttttgttttttgtttggatgtcggcgttgttgtttgtggtttttcgttttttgttgttatttcgagttttgttgattatggtttttggaagtttttcgatttagttttcgtcggtttcggatttcggttttggttacgtttcgggttcggtttttgtagtttttgttatttgttttaacgagaaggtcgttaaggagatcgttaggtagggatttcgatgtgtagcgagaaaggatgattatgaagggatagttgggggtggggtagaagagtgttgtttttttttttttttagttttggaagtttgtttttgggttgttagtataaaaattggggttatggggtattttgaatgggattgtttttttattttagggtcgtggtggagaagcgtttagtagtttgcgttaattttattttttagattatatttatgtgagttataggagttggggggttaatttaattgtaggagttgattgggaattttttttttgggggaaattttttgttttttataattttttttttttgattttttagttatgagtggaaagggaagatcgaggaagatagtgaggtgttgatggtgagaaatattttttttatttaataaaatatttttaatttttgatttttttagtttttattttttttttgagaaattgaatttaattttattttttgatttaattatgtttatttttgttttttagatgattaaaatttaaagttttttggttttagttttgatagattttgttcggtgagaattttgagatggatggggtgagggtgtgtattgtgtgggtgtgatttgttgggtagtttagggtttgcgtgtaagggagtgggtttttttgggtaaatttttgagtgattttttttttttatttatttattttgtagttttgtgtatttttacgaagtggtcgaggtaattgtattgtttgtggaataggggaatttttcgtatttgtagtgggtgcgttaggttatagagttagtttttgattttattatagttttgttatgatgagttttgtttttgtttattatgaagattttcgcgatattttaacgttttttgatttttaggtgatgattgggtttttaataaatttcgtttttgggtttttttgttttttgtttgttttttgttatgtatgtaaatttgttgggagaatataagtgtttttagtttttgtattttttatattttttagaatgatttagagttgttagatttgtttatttttttttattttaattatatagagttcgggattttttattattttttttttttagtttttgtttttaggggttaaataattttaaaaaatatttaaaaagttgtaataaaataatattaaaggaaatgggaaggatgggaggggttaggaattatgaaggagggtagagaagagggttttttttttattttttatttttggattttagtttgggtagtagggagaattattttttatttttttaggtatattttagttgtaggtgaggttagaggttagggtatgaaagtgtcggtgtgtgtgaatggggagttgggtagaggtaggttgtttagaagatgtttttttttttttatttaattaggtattgtatagagttattaggtcgtatttttcgagtaaggattcggatagggttttttcgggataggtaattaattttatttcggattttttttttagttttaggagataaattacggtataggggagaagggggtgttgagcgtttaggaagatttggggatggggatgaaattgaggaagatgaggtagttatcgagtggggggtatttttagggatgtttgtggggaaattaatgtgaagttttaggggtgatttagggagagaaggtaattgtaagaaatgggtagaaatggagagtatatgtgaattagagaaatagtgttagagattaagagttttgagtatatagaggggaagaagagtattattggtaatagaagatagaattttatttgtttgggggtttattgtttttagaggtttttgcggtgttggtagaagggtggaaggaagtaaatattcggatggggttgttggggttggagtggggaaagttaggatttgaagtaggggaataggattttttttttttgggaagtgtagagtttaaatattatttttaagggatttttttttttagaatattggttattagatattagttttagaagtcggtttaggttaagaagtgggtagttaagggggagagggaaaagaattttgggtgataaagtttagaagatgtgaataattgggagtatattttgtgggggaggggtagaggagtattgatttgggtaggtagcgggtatttgtgggtcggaagttgtagtcgttgttgttttggtaattttggttagggttgggggatggtggagatattgaggtttagaagagggggtaaaggattgagagataatttttgatttttttttatattttattatttgttttatagggttttttttgttttagtatttgtagtgttttttgtagatgagttcgttttttttgtttttggggttcgggttgattgcgtattgttgagggtggttttagtttttttattttttttttttgttttttttttaggggttttggtttcggttttcggcgtttttttaggggacgtgagattttttttttagggttttgttttgaagggaagttgtaagaggtttttttatttttttagttttttttcggatatttttaagatttttttatttttatatatatattttttaggattaatattttgagaattttttttattttttttggattagtgatttggtgagtgttttatttttagtagggggttttatagggggaggtattcgagtatggagattaaataaatattttttttttttaatttttttttttgaaatgaaattggggtaagaagagaaatgatatagggttagtgttgtaaaaaacggtttttttttacgttattttttaattttttttagttatagttttttaggtgggttgtaagtttttttttttttaggtttttattttttattttttttcgagttttatttttgtttttttttttttttaatttatcggtttttgtggttgttaagagtagagaggagtttggaagaacgtttttttttgggggtgtttgaaagttgggagaaatgaagaaaaatggggttaggggagtagtgatttttttttttttttttttcgttatatttttttgttttattttaatttttaaaattgtattattttttattttttttaggagtaaattgttttaatttttagaagtgaaggggaggattttacgattaaaattaaagtatttttttttatagtaaatattgaggtgatataggataagatgggttatatttattttggaaaaataaagtttttaagattatagaggtattttaagagttaggggagttttgaggtgggaggttggggtatatagagtgaaatattgtggtgtggagttatattgaggttatgtttaatttagtttattagcgaagttgtagttttcggatttttttagggttttcgcgatatatatagtatttaaatttatagaatttggatatgggtaagagggagtaaatatatttatataggaaaattgtgttattttttggaagatttataagtaaggacggggtaaataggtgaggtaacgttgtagaggttgggaagagattggagtggagaagggcgtgggagaattgagggtggaatacgaagaaagagggtatttttggtttttagagagtttgttttggttttatttgtttttatagaggaggggtttgtttagatattgggtgtaggttttatggaattattgtaggtagtttcggtattgtagtatttttaggttttatttgagggggaatataggatttttggtttttagaaatttttttttttataattgttttaaattttaaatttattttttatttttttgagtgttatttttattttgtttttttttttttattttttgggatttattattatattatttattttatagtttgttttttttttattatttattttttagggttattatagtaatagtaattttgttgtcggttgtttagatgtttagtattttagtttagtttttttagtttatatggtagagaaagttttatatttagtatggttcgggtataggggtttttttttagggtattttttttttgtagagataggataggtgggtggttttagaggggtggggagaggaaaaggtttgggagaggttgtggatgggaggtttttataggaagggtaatagggaagtgtttttattttggtggcgatcgtaaagatatattggcggtatatttaggatgtgttttttttttttttaggggttggagttttgggaatatggtagttttggtgataagttgtagtgataatagtagattatttattgtatatttgtgtgtgtttggtattgggataggaatagtttttatttattttatttaatttttgattatggttttgatgagggggtgtattatttttattttataagttagggaattgaggtttttagaggttaagggatttgttcgaggttatatggttagaaaaggatgtatttaaattattttttgtttgtaaaggttatattatttttttttatggttgtttttttttgggttgaaagcggatgaggattaagataaggttaagtagtttggttagagtagtggtttggggattaaggttaggataggtgatatagagattattttggagggaagagtaagttggattatttaggtgatttgtttttttattatggcgatattttttatagttgattagtcggtttttagggattatagttttagagcgatagatataatagaggagtttttttttagggagggtagttgtgagagaatatagtgttatagggtttgtttttaagtttttttttgtttttttaggttaggtttgttttttatgggatgtgtaattttaggtttttagagttttattagggttaatgtttttttatagaattagaaattgcgaattatttttaaattggattagatatatttttttagtattgtttatttggaatgggtgagtaaataggatgaaatgggaattagaattagataagggaattaggaagaaggttagaggtagaaggttttatttttttgatggtatttaagtatagtagtttattagtttatttggttagtatattttgatttttttaaagtcgaggtttggggttagaggtgggagtaggagaagttgggttttaaagtgaggaggtattagagcggtttagtcgggggggttgcgttattgtattttgggggggtttagttagaaaagaaatggggaggagaaggttatgaatgttgagaaattttttttattttttttttttttttttttttttttttttgagatggagttttgttttgtcgtttaggttagagtgtagtggtataattttggtttattgtaatttttatttttcgggtttaggtaatttttttgttttagttttttaagtaggtgggattataggcgtatgttattatgtttggttaatttttgtatttttagtagagatgaggtgttggttatgttggttaaattggtttcgaatttttgattttatgatttatttattttagttttttaaagtgttgggattataggcgtgagttatcgggttcggttagtttttttattttttttgtttattttgttattaagaatgaagtatttgtgtttttatttttaaatttttgagatattttgataggaaattattgggtatttattattagttttttgagtttttttttaattttagtgattggtttttttttcggtaattaatagtttttttttcgattttaaatttagttgttagttttttagtttttagagtttttttgggatattatatattggttttgaaattttaggagaaattatggttgtagaagtaaaggttatttagtttagaggtattataattagggtgttttgttgtttagagacgtgttttgggattttttttggagatgttttttagagtagaaacggttgtttttttaggtttgcgcgttttattaagaataattattttggtgttaggttatgttaggttatttttaaattcggggttttttgttttcgggttagataatttttttgagtgtttcgggaggggggcgtgttttagtttcggtttttattttttaggacggtaagttcgagaagggatttgtgtcggtttagttcggattcgaggttaaggcggcgaggttttttcgttcgcgtttcgcgtcgattttcggttttttgttttttattagcgttttttgtcgtttttttatcggtgatagttggggtcgtcgggagtcgggtaggggtagacgtaggagatttaggcgagtttttcgcgcggagagggtacgttcgggcgtgggggggcgtgtaggcggaggtcggggggtttttaggtttagttttttcgtttcggcggttttggggcgtatgacgtagtagttaaagtagcggtagcggtaggaggaggaggcggcgggggggagggagggaggggagggacggatcggttgggggggagggtggtgggaggggaggattgggggaaaggaggagtcggaggggggggcgggtattattttattttattttttttatttttaataggtttggagggcgtcgaagaagaggttggtttttcgcggtttggggagcgaagagtcggattcggtgggagagggaatttttttagttttttttttcgatttgagattcgtttttggggtacgagggaattttttttttcggtagttcgttttcggtttggtttttcgttttatgttatattcgttagttgttttattttttatggttattttaagtttcgtttttcggttttagtttatagtttcgttttttatttatttttttcgatgtttttattacgtttttttttttcgcgcgtttcgtttttttcgtgacgagtcgcgttttatttatcgtttttttgcgtacgcgtgtttttttttgcgcgcggtatttgggaggattgagttttttttttatcgggcggcggtcgtcggcggttggcgcgagggagtcggcgggcgtgcgcgtcgtttttcgtggacgtttcgtttcgtgtttttagggttggcgtagacgaagggcgcgaggatttaaggcggtgacgttatcgagagttagttaatgggtagcgagcgggtagagttttagtcgttcgaacggaaaggtagggaaagggcgggacgggaggaaagagttaatagtttgggagcgcgcgttagtttcgtttttggattttggggttcggtttttatttgtcgatatttattaaaggaacgtttttttttggggttggggtggtcggcggaagggtgaaagttatttataattagtgattaaggagggggcgtggatagttagagggtatatttttttgatgtgacggacggggtagggggtattagtagaggggaagatgatttaggttaaggtttagaatcggtgatagtagaggggagaaaagacgaagtttttagttttcgttttcgttttttacgtaaacgtttggtagagggtatagattatagtttttatttttatagatatgaaagtatttgtttttttgggtaaatgttaataaaatttttatttaaaaaaaaaattaaattattttttatttgatagttttgggatatggtgttttttatttaataaagtattttttagtaatttttttattttttattcgatatatagatatagggatatatatatatatatatatatatatatatatatatatatatatatatagatttggattcgtttttattttttgttggtttgagtagtattaataatatattggtttatttgggggtagggggttagataggataaaagtttgtagcgtaattaatataatattttttttaagattttttattttttaatgttagggttgtttttagaaatatcgaaataaggtttttaaaggttggtttaggttggtgttagttatggtttgtttttttttgtatattaggtttggaggaggtgaaaaggtttgagaagagatggaagttttagaagaaaatataggagtagagaaaggaggtttttatttttagtaatattttgtattagagatttttaattttttttattgtaaaatatttaaatcgagataaaatagtaataatatttatttaggaattaggattttttagaaaatggattagttgaagtttggggaaggaaatgtataagttgaatttgaaaagattattagagttttgtttaaaggatattggtattaatttgaaggaggtttttttttttgttgttgttgttgagacggagttttgttttgtcgtttaggttggagtgtagtggcgcgatttcggtttattgtaagttttatttttcgggtttaagttattttgttttagatttttaaagtagttgagattataggcgttcgttattacgttcggtgaattttttgtatttttagtagagacggggttttatcgtgttaggatggtttcgattttttgatttcgtgatttatttattttagttttttaaagtgttggggttataggtatgagttatcgcgttcggttaggaggtttttattggttaaagatggggtaatttgagtattagaaagaagaacgattgtggtcgggttgggtggtttacgtttataattttaatatttttggtggttataatgagttatgattgagttattgaattttagtttgggtaatagagtaagtttttgttttaaaaaaaataaaaataaaaataatttttagataaatatttattggttatttttggaagttgttaggatattaatttaatattgaaaattaataaataatttagtatttattttgttttttttgtatgaattgaattttagagaaattaagtagatggtaaggtaaatgtttttataaaagaatcgtgattaattaatgtagaataattaagattagaaaaatttttatttagaaattttttaatgaaataaagatttaggtatggttattgttggataaaattattaggtgaaaaagttaataaggagtttgtaaatggatgggttaggttgataatatttaaatatgataaataagtgaaagtatgggggaaagaggaagtaattagttaaaatttagaatagtatattttataggataaatgatttttaataaacgatataatagtggtagtgtgggatagggttgtggaatttgagatattttaattaagtgggtggtttttgtttggattttgatttgaataaatttattatgtataaaagatatttttgagatagttgggtgaaatttaatataaattgggtattagaggatattaaagtttatgttgttggatgttatattggtataatattaataaaaagttagaaaaaatattattattttttaaaattgaatttgtaagatagtgagggaaatttttattaaagtagaatattagattagggtgtaggtgttggttattttatagtaataattagtgttgattgggaggaggtttaagcgtatagtaggatagatttgattagattttaaataaagttagagtttattaaagggttatacgcgtaggaggagggtgtattagagaaaaaaattattgtggaggtagatagtaaggaaattttttgatttgtttaatattagtggaaggagattttagtggaaggaatttttattagtgagaatttatatagttattggttgatttttatgaggtttggagtttgaatttatattatttggaatagtttgaaaaatttttaagtttttgatttagtaattttattttaaggattatttttttagttagatgtaattgaaaaatataaaatgatgtatgtataaagttagttaacgtggttttgtttgtgattaaaaaagtgtggaaataatttaagtgtttagtagagggaattggtggataaattttggtgtagttatatagtggagtttaggtagatttaaaaataatgatttttgtatgttgatagggaggaattttagggattttttgtgtgttggttttttgagataaggttttattttgttatttaggttgaagtgtagtggtaggattacggtttattgtagtttttattttttaggtttaggtgatttttttattttagttttttgagtagttggaattataggtgtgagttattatatttagttaatttttttattttttgtagagatagggttttattatgttgtttagattgattttaaatttttgggtttaagtaatttttttgttttggtttttcgaagtgttcggattataggtatgagttattgcgtttaattagtttagattttttagttatttttttttttttttttaattagtttttttaggttaaattaattattcgttttttaaaaaatttaatttaaaagttaataattaaaaatggaattaggtgagtagtgttttagatatttgtaaaatttttttgtataaatgtgttttttgttttagaagataaaagggattggaatggagaagtttataattatttacgggttttgataaggttgacgggtggtaatcgtattttggaggtaaagcgtagagagttgagggattcggagacgtttttttttagtggagaaatgtttataaatatgagtttatgaaaagataatgtgtttaattttagtattaggggttagtagagtttggataggtttttattgtttttttttttattttttattttaatatagtttttatttgattttttttatttgttttttttatttatattttagtattattatttagagagttttgtagtaggtaggttagtttgttgtttcggtaaggtacgtgggatttttagatgattgaggtggggatagatgtttaggaataggtagggttttgtatagttaattttaattgttttttaggtttcgtattttattttatttttatttttattttgttgtttagggttatgataattagttttagcgtggataggttgttgttaatggtttgtgtttttcgaaggcgttttcgtttttcggggtcgagggttaagtcggggttaagtcgtttattttcggttaggtttataagattgaggggggttttatattgtaggtttcggttggagtgttttttagaaatttgtagttggaatatattgtggttgcgtgatgatcgtttattttgggttgtgcgggttatagttcgattttggcgggttagatgaagtagggcgtttatttggggatgggagtagaaggggtaaaaaggtaggtagaagttagtatatagtaatatgtatggaaatgaataagagtttatttttatttttttgaagttttttagtttgttaagaaataaaataagatgtatagtatgtttgaaaatggtaaggaatatatagaatagggagtgtataaaggcggggtggggaatataagttttgataggatagttaagatttttaggaaagagtatttaggtaaaggttttgagatggggagtacgattagttggttgaggaatagttaggaggttagtatggttaggatgagttgagtaagaagatgagatatgagatgtagtgatttttttcgttttggtagatgtattattttttcgttatttttaggttaaggtagatttatcgatagtttataggttaaaatcggatgtggtaatttagtttgataatttgtattttattttttaatttttttttgtttttttttttttttatttttatttcgtggtattttgtttatttttttttattttttagttttagtgtttatgggtttttattttttttttataggagatagggatatatcgagtattggtgatagtgagttttttattttttggttttgtacggcgaattttatattcgtttttttgattttttcgggttttagtggttagtaggtttcggatagttttattgtagatttttacgtagtttgttataaagttgtaggtttagttttgattatttagtttttgagttatagagaagaggtgtcgtagggttcgagggattagtttttttaattgggggttttttttaggtttattttttattgtgaaggttttgttattgtttgtttggttataggtaaagatgtatattggatagttatttagggttgattggataagtatggtaatttttttaaatattttattttgtttattttttggtgggaatattcggttaaaggaaaaattatggcgagttgggggagttggtgttttatttagggttttacgtcgttcgttagatcgggagaggttaaggcgggttggaggattagagggtttattagggttagagggaaataggaggaggttagggggtggagtgggttttttcggtaggatagggcggattcggtagaatatacggatgttgtttttgagtttttgtagttggttgtgtagtcgtcggcgttttatttttagtttatgaagacgtttttttcgtttagttagtaaggttgtttgggttatagttttttgtcgtagagatgttatttttgtttggttgtttgatagggttgtttttgatgtttgtagttttttttgtttagaagagaatataatatatatagagggtaagatgtaattaagaagaagaataaattgtggggcgtatggagtgggtggaagtgaggtttttgtttaaaaggattttaaagtttggtaaataaagaaagatgagaaaataaggaattatggtattaagatagggagtgttatgggtatgtttaagtataaagaggagtataaggaagatgatatttagggtgatatttagaagtataggagtgaattaaggaaggatgtagtatataaagaatattttagaaagagggaagtatatatgtagaatgtttagaagtgaaagttgagttatttaagagattgtaaataatttaatttagttggtgtttattaggaaggagttaagtggatatgggaggagggaaagagagtattataggaatttgtgattaggatgggaatttaaagaaagagggatggaggattaagaaagatatagatttaaatgagagttttgtaaatagttaagggtaggaagaagcgtggtagaaagtaagatagttaggagtgggttggggtgtagataggttaagagagaggtatttttagtagtatttatattgttaaagataggtgtttaggagtttttagtttagatttgaggggtatttggaagggaggggaggtatgatttttgttaggaaagcggggttgatatttggtgaaaatttggtttttattttttttttttttagttgggatattagtttttttcgttttttttgtaattttatttgttttttttgaagtttttgtattaagtttttttgcgtgtttagtcgtttttttagttttaggatataagtacgtaagttttttagtttttgttggttttgtttagtttgggtttgtattttggttaaatgtttttttagtgttgtgcgttttgtttttagggttttgatttgttgttgggtatttttgagttggttttgaagttgttggtttttttggtttaacgtttgagtttttttacggtatcgttttagttttgtatttaggttatataattgattttttaagttttaggttggacgtttgttgggtttttttttttttgttatgggaggaatatttgatgttaagatgaatatagaaaggataaaggttagtgaagtttaggttttttatttttttttttttttagtttttatgggatttatatttgatgttatatttttttttttttagagattaaatggatttttttggttatttattatttttttttttttattttagttttttatttagtggttatgtttgttatttattgttagatttttggataggaatagtaggaattggtttttggttttttaattttatagaattgaggaggtgatttaggaattataggattagtgtttttttatttttattattttttttttatatatattttaaatttttttttagatttagtttttgagtatagttatttgtggtaatagttgtggaatatcggggttttgtttttttggaaattttttgagttgtttaggagatgggagagagtaaaggtagaatgattatttttaagatggtatgtatatttgttaggataggggtagaagaagtgttttttttagaattagaaataggataattttttttttttatttttaagtttggttagtttttaatgatattttttttagaattagaaattatagttattttttagtatttaaaaggggttgattttagtattttttaagaatattaaaatttaaggatgtttaagttttttatataaataggtatatagtattaaatatagtttatgtatacgtttttatatattttatttattgattgattgagatagagttttatttgttgtttaggttgaagtgtaatggtatgattttagtttatagtaaattttatttttagggtttaagcgattttttcgttttagtttttcgagtagttgggattataggtatgcgttattacgtttaattaattttgtatttttagtaaagacggggttttattatgttgattaggttggttttaaatttttgatttttggtgatttgtttgttttggtttttattttgttttttttttgagatggagttgtattttttttatttaggttggaatgtaatggcgcgattttagtttattataatttttatttttagggtttaagtaatttttttgttttagttttttgagtagttgggattataggtaagcgttattacgtttggttaatttttttttttttgtatttttagtagagataggtttttagtatgttggttaggttggttttaaatttttgattttaggtgatttgtttgttttagttttttaaagtgttgggattataggcgtgagttattatatttagtcgtatatattttaaattatttttagattatttataatatttaatataatgtaaatgttatgttaatatagttatgtgtttataatgatatttcggttaatgatagattgtatatataatagtagtttcgtaatattataatggagttaaaaatttttattgtttagtgatattatagttatggtaatgttatagtattttttatttgtttgtggtgattttgatataaacgaatttaatgtattgttagttgtataaaagtataatatatataattatatatagtatataatatttaataatgataatgattatgttattagtttatatatttatcgtattgtattttttattgttattttagggtatattttttttatttgtaaaaatagttaattataaaatagttttaggtatgttatttaaaaggtattttaggttaggtattgtggtttacgtttgtaattttagtattttgggaggtcgaggtgggtagattaaggggttaggagattgagattattttggttaatacggtgaaatttcgttttttttaaaaatataaaaataaaattaattaggcgtggtggcgggtatttgtagttttagttatttcggaggttgaggtaggagaatggtgtgaatttaggagacggagtttgtagtgagtcgagattatgttattgtattttagtttgggcgatagtgcgagatttcgttttaaaaaaaaaaaaaaaggtaatttagaagaaagtattgttattataggaagttatatttttatgtgtgttattgtttttgaagattttttagtgagataagatgtggaggtgaaagttagtgatgttgatgattttgattttatgtaggtttaggttaatgtgtatattttttcgtttttaataaaaagtttgaaaagtaaaataatatttaaaattttttaaatttaagtttattttttggaaaaaatataaataaataaaattttaaattaaaaaaagaattttaggcggggcgtagtaatttatgtttgtaattttagtattttgggaggttgaggcgggcggattacgaggttaggagatcgagattattttgattaatacggtgaaattttatttttattaaaaatataaaaaattagttgggtatgatggtatatatttatagttttagttattcgggaggttgaggtaggagaattatttgaatttaggaggcggaggttatattgagtcgagattacgttattgtattttagtttgggcgaaagagcgagattttgttttaaaaataaaaaataaaaaataaaaattttatttttaagttaggagatagagatttatattgttttgaatatatgtttttcgtttaaaataaaatttagatagaaaaaaagtatgaggaataaggatataaaggaataaaatatttttgtaaagttatataatgtttgtgtttttagttgttattataagagttaaaaagttagtcgggcgtagtggtttacgtttgtaattttaatattttgggaagttgaggtaggtagattacgaggttaggagatcgagattattttggttaatatggtgaaattttgtttttattaaaaatataaaaaaataaaattagttaagtgtggtggagggcgtttgtagttttagttacgcggaaggttgaggtaggaaaatggcgggaattcgggaggcggagtttgtagtgagtcgagattgtgttattgtattttagtttgggcgatagagcgagattttattttaaaaaaaaaagagagagaagttttcggttttcggttcggaggaggttaaggtgtaatttttttcggttattttgaatttgggtttattcgatattagttgtttttattatgttatcgaagttcgattttaacgagattaaggtcgtatatttgaggtgtattagaggtgaagtcggtgttatttttgttttggtttttaagatcggttttttgggtttgtttttaaaaaaggttggtgatgatattgttaaggtaacgggtgattggaagggtttgaggattatagtgaaattgattattgagaatagataggtttagattgaggtggtgttttttgtttttgtttcgattattaaagtttttaagaaattattaagagatagaaagaaatagaaaaatattaaatataatgggaatattatttttgatgagatcgttaatattgttcgatagatgcggtatcgatttttagttagagaattttttggaattattaaagagatttcggggattgtttagtttatgggttgtaatgttgatggttattatttttatgatattatagatgatattaatagtggtgttgtggaatgtttagttagttaagtataaaggaaaatattttaataaaggattatttgataattggtcgaaaaaaaaaagttaaaaaaagattaaaatgttatattagttttggtaagtgggaaaaaaaatgttaagtttataaagtaaaatagttatagtaaattaaggttaatttattataaaagaattattttttataaatttgatgtagtttaattgtattatgtttttaaagtttatagtagtgtatagtaaggttttaggtttttatatttatttattatttatttattaatttatttagagtaatttttatttaaatatgttttatttaatggttagtattttgtataggtgtgttattttttattatttatattatattttaattgtattttttttatgtttaggtatgtttatatatataaatggttattattgtgttatgttatttattatgttttagtatagtaatacgttatataggtttgttgtttaagaataataggttatcgtagatagtttaggtgtgtagtaggttagattatttaggttttagtaagtatattttatgatgtttttataataatgtatttttgataatgtatttgtattgttaagtgatatatgattataattgttatattgtattttttggttttattttttattttttatgaatatttttttatttttttttttgagatcgagtttcgttttgtcgttaggttggtataatttcggtttattgtaatttttattttttgggttttaagtaatttttttgttttagtttttagagtagttgggattataggtacgggttattacgtttggttaattttatatttttagtagagatagggttttaattatattggttaggttggtttggaatttcggattttaggtaatttatatattttggttttttaaagtgttgggattataggtatgagttattgtgtttattttttttgaatatttttaatcgatggttggttgaatttgtagaagtagaatttacggatatagagggttaattgtattttatatgttaaaaagtaatttggattaagataagtaaaagtaggattatgtttaaagtatgttattatttatgtaaaaaaggtgggggagtatagttttatttgtttgaatattaatagaatttttttggaagaatatatagttgttttgggtagtagaattgggtggttggaggatagaaataggaagtaaattttattatataataatttttgtgtttttggaattttgaattaaatgaaatgttattatttatttaaaataggttgggtgcggtgttttatatttataattttagtattttggaaggtagaggcgggtggattatttgaggttaggagtttaagattagtttggttaatatggcgaaattttatttttattgaaaaaaatataaaaattagttgggtatggtgtgggtatttgtaattttagttattcgggaggttgaggtaggagaatcgtttgaatttgggaggaggaggttgtagtgagtgagattgagttattgtattttagtttgggcgatagagcgagattttgttttaaaaaaaataaaataaaattgaaagaaaagaaataagtgagttgaagagtattggatttttatgtttttggagtttatttattttgagagtttatttgtggtttggttttgtgtttgtggtattgtagtgagggatggaatttttgggtgggatgtggtaattttggtcgttgtatttaggttttttgttcgtttttggggaaagataaagataaggtttatagttattttttttaatggtttatattttttttttttttttttttatatatatatattttttatatatatgtatagttttttatgtttagtttatttttttaggttttaggttattttttatttggttaggtttttttttgagtttgttttttgagagaggtagttgggaaggggttttaattagaggtttttttagttttatgtttttttttatttttaataggggggatttttgttgggaaaagagatttttaagataatatttaggagtttaaatgttttaagaattttttgttttggtttttagttttaattgttaatattattattaagtattgagtattatttgtgttaaaagttgaattatgtgttagatagtatgaatagaagtgaggatataatttaaaagtgggaataatttttaggggaaaagttggatttgattaattttaagggtgggatttaaataagtagagaggaatggatgttttttttggaaggtaaaaatttaaatatgtatatagtatggttaagaaattaattggtttttttggttggagttgagaattataaataagggagagagtggaagatatgtgagtgttgaagattgtttgggagaattaggtaatatttattgagttatgtttgaaatgttttatttggatcgggtgtagtggtttatgtttgtaattttagtattttgggaggtagaggtgggtagattataaggttaggagtttgagattagtttgattaatatggtgaaatttcgtttttattaaaaatataaaaattagttgggtgtggtggtatatgtttgtaattttagttattcgggaggttgagttaggagaatcgtttgaatttgggaggtagaggttgcggtgagtcgagattacgttattgtattttaatttgggtaatagagtaagatttcgttttaaaaaaaaaaaaaaaaaaagggtattagaatttaattttgggcgagtacggtggtttatgtttgtaattttagtattttgggaggttgaggcgggtagattatttgaggttaggagtttaagattagtttgattaatatggtgaaattttgtttttataaaaattatttaggtatggtggtatgtgtttgtaatttagttatttgggaggttaaggaggagaatcgtttgaacgattggtggaggttgcggtgagtcgagattataatattgtattttagtttgggtgatagagcgagattacgttttaaaaaaaaaaaaaaaaaaaagaatttggttaggcgcggtggtttatgtttataattttagtattttgggaggtcgaggcgggtagattataaggttaggagattaagattattttagttaatacggtgaaatttcgtttttattaaaaaatataaaaaattagtcgggcgtggtggtaggcgtttgtagttttagtttttggggaggttgaggtaggagaatggcgtgaattcgggaggcggagtttgtagtgagttaagattgtgttattgtattttagtttgggtgatagagcgagatttcggttttaaaaaaaaaaaaaagaaattaatttttatggaatttagttgaaaggggttattttagaagtttgagggttaagttaggtagatatttattttagcgaattagatgatatttgtttgtggttttagttataagggaggttgaggtgggaggatggtttgggtttagattaaggttgtagtgagtcgtgattatgttattgtattttagtattttagtttgggcgatatattgagattttgttttaaaaaaaaaaaaaaaaaaagaaaagaaaagaaagaaaaagaaaaagaaaagaaataatatagagatttgagtatttgaagagttgttttttgtttatttgtttttgagatagggttgtttaagttggttttgaattttgagtttaagtgttttttttgttttagttttttaagtgtttaggataataagtatatgttattggatttagtaggattggttttatggatgttaagtttaattttgggaaagtgagtttgagttattcgtgatatagtgagatttatttaaggaagtttatagagtattattatttttaaaaattatgaaataatttgatatattgtttttttttgtttttattattataatttttatataagattgtgagtattataagaatttatttgttttgtttataattatataattagagggtttagtataatgtttgttatatggtaggattttatagtttttgaaggaatgaaattgaatgtttattagtggggtaatatttaaattgtgatatatttatattattggtttttataaaaataaaaagggaaaaaaagaggtagtattttttttgttatttatagaagtgtgtataaagaaagtttattttaatttagtgtaattaaatatagtatggaaattaaatttttttttaagtattttaaagttaaatattaatttttaaaaataatttgtgtttttttttttttttatattatcgtagtggatttgttatagatttatttttttggaatttatgtcggtttagaaaatgtgtttaaaggtttgtttatttaggataattttaaagattatagtatatatattttttttatttattaatataaagttagaatgatgttttttaattttttatagtgagaagtataagtatttaattttttataagaatagatatttatgtaattttgtttatatttattttattataagattagaggtggatggttttgtttttaaggtaatttttttatatatgtattatatttttatttttttttattaaattttggattcgttaaatttttttagttttaggaatatttttttagtaattttttttttttatttttgtattattagttttgtattttatggtattattttaattggtatattataaattttattattttttcgaaattaaaagaatttgaattttgttttttttaataggtattattttttttttttgtcgtttttcgtagtaaaattttaaagtattatttttagtgtatttatcgtggttaattttttttttaagtttattgtaattaggtttttatttttattattttatcgaaattgttatttttaagattataagtaattttatgttgttaagttaattttttatttttatttttttgatttattaaatagtatttgatataattgattatttttttttttttaataggttttttttagttagtttttaggagattatttttttttattttattggtaggttttttttatttttttagattttaatagtattttttatttatatttattatttatttttatgtttttaaatattattgatatgttgatagtttttaaatttatatgtttagtttagatttcgattttgtatttatattgaattgtatcgttaatatcgttatttaaggttgggagtggtgttttatgtttgtaattttagtattttgggaggtcgaggcgggcggattatttgagtttaggagttcgagattagtttggttaatatggtaaaattttgtttttattaaaaatataaaaattagttaggtgtgttggtacgtgtttgtaattttagttattcgggagattgaggtgggaggattgtttgaagttgggaggtagaagttgtagtgagttgagattatattattgtattttagtttgggtaatagagtgagagatttcgtattaaaaaaaatttttatttggaagtttaataattgattttttgatgtttaattttgttttgaatttgttttttttgtagttttttttattttaattgatataattttattttttagttgtttaagttaaaaatttagagtttttttttttttttatatattatatttaatttgttagtaaagtatggttgattgtatttttaaaatatatttagaatttaattattttttattgttttttttattgttattattttgatttaagatattattatttggtatttagattattataaattagtggtttttaattgggggtgattttatttttaaggtgatatttgataatgtttaatgtagttttgtatattgttagatgtttagtagtatttttgttttttatttattagatgttagtagtaattttttatttagttacgataataaaaaatgttggttaggtgtagtggtttatgtttgtaattcgagtattttgggaggtcgaggtgggaggattatgaggttaggaaattgagattattcgggttaacgcggtgaaattttgtttatattaaaaatataaaaaattagtcgggcgtggtggtaggcgtttgtagttttagttattcgggaggttgaggtaggagaatcgtttgaattcgggaggcggaggttgtagtgagtcgagatcgcgttattgtattttaggttggcgatagagcgtgattattttttaaaaaaaaaaaaaaaaatgttgtagggtacggtggtttatgtttgtaattttagtattttcggaggtcgaggtaggcgaattgtttgagtttaggagttagttttagattagtttgggtaatatggtaaaattttgtttttattaaaaatataaaaaattagttaggtatggtggtagttgtttgtagttttagttatttaggaggttgaggtgggaggattatttgagtttaggaagttaaggttttagtgagttatgattatgttattgtattttagtttgggaatagagaaagagaatttgttttaaaaaaaaaaaaaaaaaaaaaaaggtaatggtgttatggttacgaaaatttggtggatttaataaattttatttttttgtttaaaattatttaatgattttttattttatttagagtaaaagtttttataacgatttttataaggataaattgtgattagtaattttattatttattatttgatttttttttttataatttttttttttgtttattttattttagttatatttttttttttataattttttagggattttgttttagtagattttttttgtttgaaatgttttttttttattatttgtttgtttgttttttttattttttttaagtttttatttaatttattttttttatgggggttattgagattattttatttaatattttaattcgttagttggttttttttatgtttttaattttgaatttttttttttttttatagtatttacggttttttggtagttatataatttatttattatatttattgtttgtatttttatagaatggtagttttacgatggtaacgatttgttttttgtttattgttgtattttaagtatttataattacgtttagtatgtagtaggtgtttaataaatatttgattaatagatttgagaaggtttttattattttttattgttatataatattattttgttttttggttgttacgagagaaagaattttttttaaggttgaattttaattttagggaaatttgaacgtgaaatattagtaaataaaggatttaggtagattttttttggtattagagataagtatattttagttgttatatatatttatttttttttattggagataggaagttgtatatggttgtggggtgtagtagggtattatttaagagaaagaattaaattaattagttttattgggtaggaatttgtataatttgggaaaggagagagagaatgagaagttttttggtttagattattttatttttttttttttttttttatatttcgaagtagtagtgataaggagaggcgattaatataaaaggattttagtaaggatgtggttttagatattatgtttttaaaaggaagaagttatattagaattttttttttttatatattgtaattatattttgagtaggaataaagaagtggaaatgtgttagacgagtttgagaattcgaaatgagaaatttcggagatatgaaagttaagggaggggttttagaaatttgaagttaggggagggtagatagacgtgtttttcgattttttcgggtgttttaagtcgtttttatttttgttttcgtttttttttatttgtgcgggggcgtacggattttcgttttttcggtagatatgataaaggtcgatcgggagtcgggggcgcgatagtatcggagcggttagttttcgtttttatttttagggtaggatatttgcgtcgtttttatttatttgcggatttatgtttatttcggttttatacgcgtcgggggaatgtagtggaagagaattgggtgtcggggattttgggattcgcgttttttcgttcgttcgcgaagtagggtagagaattcgtacggtttcggtcgttattagtttcgcgttatattcgttatttttgaattttaacggttattatttatttttatcgcgttttgtacgtagggattaatcgtcgttgtcgttatagtcgagggttaatcgtagcgtttttcgttattcgaagttatatttcgttcgataggcgttttgttttttttgtttcgtaggcgtaggagaggtaggcggattaattttattttcggtgttatttatgttttttatttttttttttttttagcggtaatagtgttggattttcgttcggtttttcgtcgtcgttcgttacgttagaaaatgcgtggacgtcgtcgtacgaacgtaattggttaagcgaaattggtggcggtcggaggagaaggggcggggacgttggaggaaagaaatgacgcgtgcgtaaacgaggattcgtgtcgggagataggcgggattagcgttttttggtgattgtagtagggagcgtatttgtttttcgtcgacgtgattgaggttttagcgttgttttttttggtcgtggttgattgggttcggaagtggtttttggagtttttacgtggatgtgagtggtttggtttgtttattttttggtaatgttgttattttttattaaatttaggaatttttgcgttttattgaagtttgatagtggggatttaaagtttaggaaagaatttttttttatagttttttttttttagttagtttatttatttgggtgttgttattggtattgggtttagggtttttggagtttcgagttcggggaagatttattgtttttatttatggagtattttatgttttgtagattgtgtatttgtattatttcgttttttaattacgaaaatttattgagtttttatattgtgttatattttttgtagagatggatggagataggtttagaaagattatataataaggttatattgttggttaggaatggatttagattttattagttttaaaatttaagttatttttgttaatttacgttgtttttaatagtttcggtgataagagtaattttttacgtgtgaatagggtgttagtttgtaaagtcgttttattatatttatttattcgagtttttatttaattttggaggtagttaggatagggttttatttatgaaatcgaaaggtaggggttttaagtatatgttcggggatttggtgtgtagttggaaattggtaggtttgatattcgcgttgtcgttttttatttattgttttaatttggttttaaataagtttgtagagagaagtagattgtggggagatatattgtttgaaaattatgttgttatttttttaatttttgatattttgggaaaattttaaaaagtaagagtttgaagagaatatagtaaaaagaaaaggaagaaattagagaaaattaataatggaaggtaaagggggataattgagaagggagatttgagaagaaatatatagtaaaagatatttattaaattaaaaaaaaatttaaatggaatggagaaatatagatttattagtagattaaagggggaaaatgtatttattttaattgatgtagtaaagttatttaaaatatttaatattcgttgatattttttttaaaattttagaagttgataaaggatatttttaaaaatttcgtaaaatatattattataatggggaaatgttgaaagcgttttttttaagatggggaataaggtaaggatgtttgtttttaataatttttattaataaaataatggaagttgtagttagtttaataagtaataaatatataaggattataagaaatattaatgttaatattcgtagatgaaattattgtatgtgtagtatttttaaaataaaatttagatagaattgataaataagtttagtaaggttgatggataaaaaattagtaagaggaaaaaattaatttttaaaattaattgtattttcgtttttagtaatattagttataaagtgtaattgtaaaaattatattatttggtggtcgggcgcgttggtttatatttgtaattttagtattttgggaggtcgaggcgggcggattacgaggttaggagatcgagattattttggttaatatggtgaaaaattttttgtattaaaaatataaaaaaaattagtcgggcgtggtggcgggcgtttgtagttttagttatttaggaggttgaggtaggagaatggcgtgaattcggtaggcggagtttgtagtgagcggagatcgcgttattgtattatagtttggaagatagagcgagattttattttaaaaaaaaaaaaaaaaaaaaaaaattaaaaaagttagttaggcgtggtggcggtcgtttgtaattttagttattcgggaggttgaggtaggtttacggaaatagtgatatgattcgtgttaaattttgaagtaatttttttattaaggttattggatatagaattcgagtgatgttgtattttttaaggatttaaattaatgaaaagttaataggtcgggtgcggtggtttacgtttgttattttagtattttgggaggttgaggcgggtgaattacgaggttaggagtttaagattagtttggttaagatggtgaaatttcgtttttattaaaaatataaaaaagtcgggtgtggtggcgggtatttgtaattttagttatttgggaggttgaggtagagaattgtttgaatttggaaggtggaggttgtagtgagtcgagatcgtgttattgtattttagtttgggtaatagagcgagatttcgttttaaaaaaaagaaaaaaagaaaaagagaaaaaaagagaagaaagaaaaaagaaaagttaataaataaacgtggatttgtgtttttaaaaaaaaattgttaggtatggtggattatgtttataattttagtattttggaaggttaaggtagaaggattatttgaggttaggagttttagattagtttggttaatatggtgagattttatttttattaaaaatataaaaaaaattagtcgggtattgtggtatgtgtttgtaattttagttatttaggaggttgaggtaggagaattgtttgaattcgtgaggtggatgttttggtgagtcgagattgtgttattatattttagtttgggtaacgagggtaatattttattttaaaaaaaaaaaaaaattatttaaaaatttaaaaggttgtaatttagttttgatttaaataggttaaaagtagttatgatgatatttaataggaaatattgtaagatgagaattttgatgaggttttttaggggaggatagatggtataggtataagtatatatgtaggtataggtataggtatagatattggtataggtatagatatagttatagtaatggtagattttaaattataatgaattaatatttggttaaaggcgaaaaagttatttaagattatttttatgtatgtttagtttttagtaaaggtaattattattttatttttaaaattttttattttttggagatggagtttttttttttttttttttttttttgagatagagtttggttttggcgtaatttcggtttgttgtaagttttgttttcggggtttatgttatttttttgttttagttttttaagtagttgggattataggcgttcgttattacgtttagttaattttttatatttttaatagagatggggttttattatgttagttaggatggtttcgattttttgattttttgatttattcgttttagttttttaaagtgttgggatgataggtatgagttattgtgtttggttaaggagacggagttttgtattgttttttaggttggagtgtagtggcgtgttttcggtttattgtaatttttgttttacgggtttaagcgatttttttgttttagttttttgagtagttgggattatagatattcgttattatgtttagttaattttggtatttttagtagaaacggggttttattatattggttaggttggtttcgaatttttgatttcgtgatttgttcgttttagttttttaaagtgttgggattataggtgtgagttatcgtatttggtttattattttatttttaaaattgtaataaagtcgcgtagtttttgagataggttatttttttttttaaataatttttttttatttattttaagatagagttttattttattatttaggttggagtgtagtggtgcgatttggatttattgtattttttgttttttaggtttaaacgattttgatttagttttttaagtggttgggattataggtgtgtattattatgttaggttaatttttgtatttttagtagagagggggttttattatgttggttaggttggtttggaatttttgattttaagtgattcgtttgttttagttttttaaagtgttgagattataggtatgagttattgtttttggttaatattttaaaatttttaatgaaataaaatagagatagggttttattatgttgtttaggttggttttaaatttttgggtttatgtagtttttttattttggttttttaaagtgttgggattataggtttgagttattatgtttggtagtaattggttattattaattttgaaaattgtaatttgaaatttaaggttttgattatttgttataggaaattatatttgttagaatgttatagtagattgtgtttgtttattttaagttaattatatttgttatgtgaagttatatttgtatattaatttatgttggtaagttattgtttatgattttattgatttttttataattatatttatgtattattttgttaagatagattttaaatttagaattttttttttatgggttgtaaatataaaacgttatttgtttaagtttgtttgtgttattataataaaatatttgagatagagtaatttataaataatagaaatgtgttttttatagatttggagggttgggaagtgaaagattaaggtgtcggtaggtatagtgtttggtgagggatttggttttttttttatatagagttttgttgttgtatttttcggaggagatgaatgttgtgtttttatatggtagaaggataaaaaagggtcgaagttagttttttttagtttttttttttagtttttttttttaatttatttatgggagtggagtttttatgatttaattattttttaaataattttattttttaatattattaaagttgagattaaatgttaatatatgaattttgggggatatttagattaaagtagtattatagtatatttgtttttagaaatgtataatgatatatttttgtgtgtgtttgtttttagttagggttttattttgttatttaggttggagtgtagtggtataatttcggtttattgtagattttattttgtaagtttaagttatttttttgttttagttttttttttttcgtaaatagttgggattgtaagtttgtattttatgtttagttaaattttgtattttttgtagagatagggttttgttatgttggttaggttggtttcgaatttttgattttagtaatttatttattttagttttttaaagtgttgggtttagcggttggggtgttttttgttattttatttttattttttttttttttgaattatttaaatatttagttaaaggtagagatagaaataggaggggaggtaagttgggttgagaatgtttgtgtaatattaggtttgaaggtatttttagaagttaggtattgtttatattttattttaaattgttatataagtgttatttttaatcgtgtgttaatattatataatgttataattatacgtggaattgaatgaaggttttggagagttttttataatagaaatttttagatttagatttggaaataattggttatttaagtgagcgagaggtggggttaaaataaagaattgtgtttttttatattttattattatttttttgataagaaatggaagacgttaaataaaaatgggagtttaggttcggtgtggtggtttacgtttgtaattttagtattttgagaggttgagttaggtggattatttgaagttaggagtttaagattagtttggttaatatggtgaaatattatttttattaaaaatataaaaattggttgggcgtggtggtgggtgtttgtaattttagttatttgggaggttgaggtaggagaattgtttgaatttaggaggcggaggttgtagtgagttaagatcgtattattttattttagtttgggcgataagagtaaaatttcgtttaaaaaaaaaagtcgggtacggtggtttatgtttgtaatttgtaattttagtattttgggagattgaggttggtagattatttgaggtggggagttgagattagtttgattagtatggagaaattttatttttattaaaaatataaaattatttagacgtggtggtgtatgtttgtaattttagttatttaggaggtttaggtaggagaatttttagaattcgggaggtagaggttgtggtgagttaagattgcgttattggattttagtttgggtaataagagtgaaattttattttattaaaaaaaaaaaaaagggggagtttagattaggtatagtagtttatgttcgtagttttaggattttgggaggttaaagtgggtggattgtttgagtttaggagtttaagattagtttgggaaatatggggaaattttgtttttataaaaaattagttaggtatggtggtatataggtgtagttttagttattcgggaggttgaagtgggaggattatttgagtttgggaggtcgaggttgtagtgagtaatgattatattattgtattttagtttgggtgatagagtgagattttgtttttaaagaaaaaaaaaaaagggtagggggtagtttgtgtatatatatttttttttttttagatttttgtttttggatatgaagatttttttttagggtttttagtttaagttgttagggagatattatttagtattattatattttttatttgcgtggataggttttttaggggatggttattttttgtgtaagatttattatcgtttcgaaaattaatgttaaagatttagggaagatatgttttttagaggagttttagggaaatatttttttttttttgattattgttttttaagaaaaattagttataaaaggaaaaaaaaaaagtgattgtattttataatgttttggtttatttttatataagttgtaaatttaatataagaaatatttatggttgggtgtagtggtttacgtttgtaattttagtattttgggagggtgaggtaggcggattatgaggttaggagttcgagattagtttgattaatatggtgaaatcgcgtttttattaaaaatataaaaattagttgggcgtggtggcgggtttttaattttagttatttaggaggttgaggtaggagaattgtttgaatttaggaggcggaggttgtagtgagttaagatcgtattattgaattttagtttgggttaatatagcgagattttttttcgataaaaataataataataattttaaaaaaagaaatatttattgtgtgttaacgatttggagttagaggttttgtgaaggtgtcgtattatgttgtttgttgggattatagtagtgaatataatagatgtgggtttttattttttaaagtttttgtttagtgaggagtatagatgagtagagaggtagcgataaaaattaaaagagattatgtatgtgaagtttttagtatagtttgtataattgtacgtatttttgagtagtagtagtagggtacgataggttagagtcgggtttattaagtgtgtagaattgagaagggttgtagtacggaatagtttggggagttgaggttggcgggatgggtaggagggggtagattatgaaggttttattttggggataggagtaggagttttttataaatttgttagttggtcgggattttttatttttaggatggggaagggtgaaggtttataggggtaaagtttgtgttggagtgagtttaggaatttaagattagtttgggtaatatggggaaaaagagtaaatatttttttttttttgtattatgtagtttgttattatttgttatagagatttttatagggtaaggttttttgttcggttatttcgagtgttataggtttgtttaggggtgttttgtttatatagggtgttgtggtttaggtttttaattttggtttagttttttatagttgagtataatattgatattgatattgagtttttgatagaggttgttagtttttttttagtattgtttttttaattttttcgtgttaataaattttagatttttttttttgtaagatatatggttattaaaaaagattttaatttttagttttttttgagattaggtatggtaatggatagtgttttggttaatagagtataaatggaagtaatatatttatattttagggagagttttaaaggaaggagtatgttttttttcgttaaattatgttatttgttgagaatagaagaattataagttttatcgggcgtggtggtttatatttttaattttagtattttgggaggttaaggagggtagatcgtttgaggttaggagtttgagattagtttggttaatacggtgaaatttcgtttttattaaaaatataaaaattagttgggcgtggtggtatgtgtttgtaattttagttatttgggagttgggaggttgaggtaggagaatcgtttgaattcgggaggggaagtttgtagtgagttaagattgtgttattgtattttagtttaggcgatagagtgagattttattttaaaaaaaaaaaaaaaaaaagaaaaaagaattataaattagaaatgttttgtttttttggtaattttggaagttttgtattagttttggattggttattttagaatttgtttataggaaaaatttatttgttttttgtttaagttattgttattttttaaatttttggatttaagttatttgttttttatggttttttaaagtgttgggattataggtatgagttattgtatttagtttagatattgttgttatgtttttatagagtatcgtggagtagtttgagtggtttgggttttgtttcggattttgtgtttgaagggattttgtattttggagtattttttttgaaattttttaagttattttatagagttaagggttagtttgtgttagtagagaattcgtttttattgggcgtttatggggttttgtagttttgtaggattaattttgttagtagagaggtattttttttatggatcgtatatgattgggttatcggttggtttattttgatttttaagtttgagttgtatgtgtgggttttagtgatggttttttcgtttttattttttgtgttttaattgtggtggtatttttgttattttagagtggtaggtagttaaaggagtttttcgttttgtgtgttttttattgatggtgtcgcgttatatgttttattggtatttaggaaagttattttatttattttatagtttttgtgttatatgttagattgttttttgggaatagttttgtttatttttttttaaagtttttaggaaggttgttttataatttaataggttttttttattaatgtttttttttttttttaattgatgtgttgattttttgtttttttaggttagttgtgttggttaagggatggattttttttatgttaaagtgattgtttggtttggtgtagtggtttatttttataattttagtattttggaaggttaaggtgggaggattgtttgagattaggaatttagtattagtttgggtaatatagtgagattatttttttattaaaaaaagaaggaaaagaaagggattgttttttttattttatttataggtcgtttatttatttattttattggtggttttgtgtaaaatgtaggggtgttgttattattgaaggcgattatatttagttaggtatggtggttaacgtttgtagttttagtattttgggagtttaaggttggtggattatttgaggttaggagtttaagaatagtttgattaatatggtgaaattttatttttattgaaaatataaaaaaaattggtcgggtatggtggtatatttgtagttttagttatttaggaggttgaggtaggagaattatttgaattcgggaggtagaggttgtagtgagttaagatcgtattattgtattttagtttggcgatagagtgagatttcgttttaaaaaaataaaataaaataaaataaaataaaaatagaatgtttggaaggtttgtttttcgtttattcggagttgtagtgatttgggttgtaaattatagttaagaggggtttgatagtttttaattttttattgttagagagtttatagtaagattatggttttttttatagttataggaatttagaaatttgttatgttagttagattttgaattttttatttgtaggtaattttagtttttttttttttttttttttttttttttttttgagatggagtttttttttgtcgtttaggttggagtgtagtggtgcgatttcggtttattgtaattttcgttttttaggtttaagtaattttttgttttagttttttgagtagttgggattatagacgttcgttattatgcgtagttaattttttgtatttttagtagagatagggttttattatgttggttaggttgattttgaatttttgattttatgatttattcgttttagttttttaaagtgttgggattataggtatgagttattatttttagttagaagtaattttggtttttttaattgtagggtttttgttagttgataagggaatatattagattatgggattttatattttagtaatgagagggggtgttttttaatttaggtagtgatgtgaaggtatttgtatttttgaaagaatacgttagttataaaatggagaatagattggtagtaattgggtgaggatgaggaaagatagttaggatattattgtagttatttaggtaagaggtaagaggatttgaataaaagtgtagttgtgaagatgtagagaggttagagatgtggaaggtttttaataggtagaattagtaggatttggagatggataagatatgaaatgggtggggcgagtagagaaggtagttggagggagaatgttagatttttggtttgagtaattgggtggttggtaaagttagttatagggagataggtattaaaagaggaggagttttgtggagaaggttaagggttttgtttggatatgttgaggttatattgtatttagggtgtgtagggtataagtaaatatataaataaatttattttaaagtttataataggttgggtataatggtttatgtttgtaattttaatattttaggaggttaaagtgggtggattatttaagtttaggagtttgagattagtttaggtaatatatttagattatgtttttatatatatatatatagatatatataaaaaaaaaaaaagaaagaagaaaagaaaatatattataaaatatatgagcgttatatttgtaattttagtattttgggaggtcgaagcgggcggatgacgaggttaagagattaagattattttggttaatatggtgaaattcggtttttattaaaaatataaaaaattagttgggcgtggtggcgggtatttgtagttttagttatttaggaggttgaggtaggagaattatttgaattcgggaggtggaggttgtagtgagtcgagattatatttttgtattttagtttgggcgatagagtgagattttgttttaaaaaataataataataatgataataaatgagtttatgtgaagtatagtgatgttattttttttaagacggagtttcgttttgttatttagtttggagtgttatggcgttatttcggtttattgtagttttcgtttttcgggtttaagcgatttttttgttttagttttttaaatagttgggattataggtatttattattatgttcggttaatttttgtatttttgtagagatggggttttattatgttggttaggttggttttaaatttttgtttttaggtgatttatttgtttcgtttttttaaagtgttgggattataggcgttagttattatatttagttttaattgtatatttttttgagttttttagggtatagttaatgtatttttaaaatgtgattatttttttttttttttttttgagatagagtcgcgttttgttatttaggttggagtgtaatggtgcgatgttagtttagtgtaatttttagttttcgggtttaagtgatttttttgttttagttttttgagtagttggtattataggtaatcgttatcgcgtttggttaatttttttttttttttttttttttgagatggagttttgttttgttttgtcgagagtttttttgtttgtttgttttttgtgatggggttttgttaagttggttaggttggtttcgaatttttgatttcgtgatttatttgttttggttttttaaagtgttgggattattgattggtgtgagttattgtgtttttatttttttttttttttttttttgagatggagttttgttttgtcgtttaggttagagtgtagtggcgtgattttggcgatttttttgttttagttttttgagtagttgggattacgggtgcgaattataatgttttgttaatttttgtatttttagtaaagacggggttttattaggttgggtaggatgattttaattttttgatttcgtgattcgtttgtttcggttttttaaagtgttgggattatacgtgtgagttattgttttcggtttatttttaaatttttgagataaagttttgttttgttatttaggttggagtgtagtggtacgattttagtttattgtaatttttgttttttaggtttaagcgattttttcgttttagtttgaggagtagttgggattataggcgtatgttattatatttagttatagatttttgtttttgaatataatataacgtgggaaaagtatagtaaatttattgatgttttatttattttaaatgatataaattttgaattattattaaattttacggaaattattataatttatataaataatatgttgtaaatatttgaaataagttatgtaatagtaagtttttataaatttattagttttaggagaagtattatttttttttttttggatgttagaattttgagaatagtatgtgtaaagtaaaaatgtattcgatttgagagttatatttagttttttgaagttttttaaattttgttagtgagtcgtttgttaattaaaagtgattttttgagtttgatgtggtggtgcgtgtttgtagttttagttacgttggaggttgaagtaggaggattttttgagtttaggagtttaagattgtaggatttttaggttatagtgtatagtgatttcgttagtgaatagttattgaattttagtttgggtaatatagtagaaattttgattttattttttatttttttaattatttatttatttatttatttatttatttatttatttatttatttattttgagacggagtttcgttttgtcgtttaggttggatggagtgtagtggtgcgattttggttaattgtaagtttcgtttttcgggtttatattatttttcggttttagtttttcgagtagttgggattataggcgttcgttacgttcggtttatgagtcgtttgtttcggttttttaaagtgttgggattataggtatgagttatcgcgttcggtttgattttattttttaaaataaataaatagaaaggggatttttattttgttagagatatttgaattagagtaattttattttgaataggggttggataaaatgaggttgaaacgtattgggttgtatttttagatatttgaggtattttaggttataggatgagataggagatcggtataagatataggttataaagattttgttgataaaagaggttgtagtaaagaagtcggttgaaatttatcgaaataaagatggcgatgagaatgatttttggttgtttttattgttatatttttattagtaatttgatagtttataaatgttatggaaatattaggaagttattttatatgatttaaaaaggggaggtatgaataatttgttttttgtttagtatataattaagaaataatttaataatgggtaaatagtagtttttagggttgtattgtttttggagtaattttttttcgttttttaatttttttaataaatttgtttttattttatggatttgttttgaattttttgttgtatgagatttaagaatttttttttggggtttggattatgattattttttggtaataattttttaaagaaatttttttttttttttgagatagagttgtgtgttttttttttgttgtttaggttgatttgcgatggcgagatttcggtttattgtagtttttattttttaggtttaaatgatttttttgttttagttttttgagtagttgggattataggcgtttattattacggttggatagtttttatttttatttttagtaaagatgagattttattatgttggttaggttggtttcgaatttttgattttaggtgatttacgtgttttagttttttaaagtgttgggattataggcgtgagttattacgtttagtttaaagaaaattttatatttgattttatatttttttaaaaaggttttataggttgggtatggttgtttatgtttgtaattttaatattttgggaggtcgaggtgggtgaattgtttgagcgtaggagttagagattgaaattgtttttgtaaaattatgattgagatagtgaaagaaatttaatttaatcgattttattttgtttttaatttttaagttgttatttatttttgggtttaagttgaattaattttgggagaaatttggtttataatttaaaataaagataataatagttttttttttttgttttaatagttttttaaaataaagataataatagattttttttttgtttggggattagattgtttttgtaggattaatatagattagaaattatggtttaggttgggtgtagtggtttatgtttgtaattttagtattttgggaggtagaggcgggcggattatttgaggttaggagttcgagattagtttgattaatattatgaatttttatttttattaaaaatataaaaagtagttgggcgtggtggtatgtgtttgtaattttagttatttaggaggttgagataggagaatgggttgaattttagaggtagaaattgtagtgagtcgagattgcgttattgtattttagtttggataataagagcgaaattttgttttaagaaaaaaaagaaaataaaatagaaagaaagaaattacggtttaggagttatgtaggtgaaggttataagattttgattttttttaaatattttttaagattagtgtttgagatattttgtcgattttgtatttgatggattagtcggtattatttagattgattaattggtttatttgattttatggtttttatttaggaattgatttagcgtaagaagatagtttagattttttatgattttatttttgattaattagtatttttggtttattggttttttttgatttattaagttgtttttaaaaattttgttttttaggttgggcgaggtggttcgtgtttttaattttagtattttgggaggttgaggtaggtggattatttgaggttaggagtttaagattagtttggttaatttggtgaaattttgtttttaaaaatataaaaattagttgggtatggtggtataggtttgtaattttagttattgaggttgaggtaggagaattatttgaatttgggaggtggaggttgtagtgagttaagattttgttattgtattttagtttgggtgatagagagagattttattttaaaaaatagaataaaataataataataaaaataaattttgtttttcgaatttttgggtagattgatttgagtaataataaaatttttgttttttatatagtaggttttgcgtgaattattttttttatattgtaatttttttgttttgagaaatcggttttgtttaggtagcgggtaaggtaaatatattgggcggttatgagattagtttagttaatacggtgaaattttatttttataaaaaatataaaaattagtcgggtgtgatggtgtatttttgtagttttagttttttagaaggttgaagcgagaggatggtatgagtttaggaaacggaggttatagtgagttaagattgagtaattgtattttagtataggtaatagagttagattttgtattaaaaaaaaaaaagttttatattatttttttgtattattttaattagtgtattgtgacggttttgtttattagttaaatttagttaattagtataagtatttgtttagtttgtttatttggttggatttttttagggaaagtttatattgatattaaaagtttggttatagaagttgttattttttaaaagtgttaggtttttatattgaaagtttagaataattttttttttttttttttttttttttgaaattatgatatatttaagtagaaaattatatagaatagttataatgaatttgtatgggttaaaggaaaatttttttttcgttttttgaaggttggttggaaaattaatttacgaaagatagatgtaggttgggtacggtggtttatatttgtaattttagtattttggggggttgagtcgggtggattatttgaggttaggagtttaaaattagtttggaaatatggtgaaaatataaaaattagttgggtatagtggcgtgtgtttgtaattttagttattcgggaagttgagataggagaattatttgagtttaggaggtggaggttgtagtgagttgagattgtgttattgtattttagttttgtcgatagagtaagagtttgtttaaaaaataaaataaaataaaataaaaaaaaaaaaggtgtattggagaagaggtatataaatggattaatgtgtatatagagagaattatagagtgattaattaatttataatagggtttaggagtttatttattattttggtaaaataggttatgggatagggaataggaatttttttgaggggttataggcgattattagggagaatgaatgggtttagagatagagattgagttttgaatagttttttgtggaatgtgaatgagttgagagatagatttttttgggaaaggatttgtttaggtgtgattttatttttgattttatagggaggggaagagaaaataattattttttgtggtatgtttggatttgaagtagataaaggaattttagagaataatttattttgtttgtgggagagttggttgagaagagaggttagagaaattttgaagttttttttttagtttagtatgttggtatattttggggtattaatttttgagttttagtaaattttatagatattatttttttatataattgtaaatataaatttttttttttttttttttttttgagatagagttttattttgttatttaggttggagtgtattggtacgattttaatttatagtaatttttatttttcgggttaaataatttttgttttagttttttaagtagttgggattataggttcgtgttattttattcggttaatttttgtatttttagtagagatggggttttattatgttggttaggttggttttaaatttttgattttaggtgagttattcgtttcggttttttaaagtgttaggattataggtgtgagttattgtgtttggtttttttttttttttttttggagattaagtgtcgatttgttatttaggttggagtgtaatggtaggatttcggtttattgtaatttttatttttcgggtttaagtaatttttttgttttagtttttggagtagttgggattataggcgtttattattatgtttggttaatttttttatattttgaatagaaacggggttttattatgttgtttaggttggtttttaatttttgattttaagtgattcgtttgttttagttttttaaagtgttgggattatatttttttttttttttttttttatgggggtggagttggggggtgttttattatgttgtttaggttggtttttaatatttgggtttaagtgttttttttatttgtttcggttttttaaagtgttgggattataggtatgtattattgtgtttgatttaaattgtttttttttattatatttttgttatttgaaaaaaaatagggtttgtttgtttggtaaataataaatgattttttataaggtaggttttaattaataggagtttaattataagtaaggagagtattgggaggattttttaaagtagtgtttttcggagagaagtgataggaggattttagggggtgatggggaggggagagggtgttttattgtatgtagaggaggggttttagttttggaaatatagtgaatttttacgttcgtatataggttatatgttatgagaatgaagttatagttttttttaggatggagattttagtatggtaatgaggaatttttatttaggtttatttataagtttttggggtttgttaggagttagttttaattaattaggtgattgtagttaatatagggtttaggaaaaaagaggttgtacggtaggaggttgtaaaataagttaattgtttagggtgattaaatttttgtaatttttgaagattttttttgtttgtttatataatataaaatatttgtgattagatgtatgggattttttttttatatattaaatagttaattatttagtaaatattgagtggtttatttgatttaatttagttattagttatttggagatggtattagattttatagggggagggttgagttttaaaagattgttttttattttagatgttaattttaagattaaggttgtgatttgtgtttttgataaatttgttataaattagggtttttataattttttttttggttttataatttgttaggattgttaatagaatttagggaaatacgtttattatttaattatgtaggacgttttaaagatatagatgaatagttggatttaaaagatgtatagggtgagtttttgggaggaagaggtttggcgtttttatggtttatttgggtattatttttttagtatttttaagtgttagtattttgttaatttattaatttttttttttttttttttgagaggtagttgtattttgttgtttaggttagagtgtaatggtaagatttcggtttattgtaatttttattttttgggtttaagggattatttagttttagttttttgagtagtagagattataggtattttttattacgtttggttattttttgtatttttagtagagatagtgttttgttatgttggttaggttggtttttaatttttgattttaagtgatttgttaattttagtaaagggttaggattataggtatgagttatcgtgtttagtttttatttatttttgtttaagagtttttatggtcgggttattgtattttagtttgggtgatagagtaagatttcgtttcggaaaaaaaaaaaagagtttttagaggttaggtgtggtggtttacgtttgtaattttagtattttgggaggtcgagatgggtagattatttgaggtaaggagttcgagattagtttggttaatatggcgaaattttatttttattaaaaatataaaaattagttaggtatggttgtgggtatttgtaattttagttattcgggaggttgaggtaggagaattttttgaattggggaggtagaggttgtagtgagttaagattatattattgtagtttagtttgggtgatagagtattttgttttaaaaaaattttttttttttggttttaattttttgattttatgatttatttgtttcggttttttaaagtgttgggattatacgtttaggtaatttttgtatttttagtagagatagggttttattatgttggttaggttggttttaaatttttgattttaggtgatttatttgttttggttttttaaagtgttgggattataggtatgagttaatgtgtttagtttattatttttaaattgatagataaattttatatatttattatataggatatgatggtttggttttggtttgattatttatttattaaatatttatttatttatttttgagataaattttagttttgttatttagattggagtgtagtagagtgatttttttggtttattgtaaatttaattttttggatttaagagatttttatgttttagtttttagagtagttgggattataagtatgtattattatgtttagttaatttttgtattttttgatagagatggggtttttttttgttgtttagattgtttttgagtttttggttttaagtgatttatttatattagtttttcgaagtgttgggattataggcgtaagttatcgcgtttggtttgtttttttatttttatttttagtatttttttgagataagttttttaggttggggtgtattgttatagttaaggtttattgtagttttaaatatttgggttttagtgatttttttattttagtttatagttgggattataggttttagttattatttttagttaattttttgtattttttgtagagatatggtttgtttatgttgtttaagttggttttaaatttttgggtttacgtaatttttttgttttggtttattaaagtattgggattttaggtgtgagtttttgtgtttagtttaatttttagtttttataggtattatatgttattttgaagtatatataaatttggaatgattaaatttagttaattaatatatatgtattattttatataattattatttttgtggtgagaatataatatttaattttttaatattttttaagaatataatatattggtttggtttggtttggtttgttttttttttgagacggagtttcgttttgttatttaggttgaagtgtagtggcgcgatttcggtttattgtaagtttcgttttttgggtttatgttatttttttgttttagttttttaagtagttgggattatcggcgttagttattatatagttaattttttttttgtatttttagtagagacggggttttatcgtgttagttaggatggttttaattttttgatttcgttattcgtttttttcggttttttaaagtgttgggattataggcgtgagttattatgtttggtttgttttgttttgtttgttttgagagggagttttgttatgacgtttaggttgaggtataatggtgtgatttcgttttattgtaatttttgtttttcgggtttatgagatttttttgttttagttttttaagtagttgggattataggtgcgtattattatatttagttaatttttgtatttttagtagtaatggggttttattatattggttaggttggtttcgaatttttgattttaggtgatttgttttttttagttttgtaaagtgttgggattataggtgtgagttatcgcgtttataatatattgttattaattatagttattatgttgtattaaattttaaataggaggatattttatgtgttttataatttgttttttttttttgatgaattttatatttttgagttttatattttgatgttttttgtttttttttttttttgaaatatttagatttagttagtttattttatgttgtagaatagtgttgtttaatagaattttttgtaatgatggaaattttttatattagtattgtttaatatgggtatttattaattatatgtggttattgagtatttgaaatgtggttaatgtgataaaggaattaatttttgagacggagttttgttttgtcgttaggttggagtgtagtggcgtgattttagtttattgtaatttttatttttagggttcgagcgatttttttgttttagttttttgagtagttgggattataggtatgtgttattatatttagttaatttgtgtatttttagtagagatggggttttattttgttggttaggatggtttcgattttttgattttttgattcgttcgtttcggtaaagtggtgggattataggcgtgagttatcgtgtttggttaaggaattaaatttaaatttttaaaatgtgaaatatagacgtaattttaattatttaaatttaagtttaaatagttttatgtggtttattgttattatgtgggataacgtagttttttaatatttaattatataaatatattataaataatgtatttatttttttgtttatggattttaaagtatttttaattattttatatattgttatattaaaaaatgttgtaatgaatatatttttgtatgtttttttgagtaaatgtgggagaggttgggtataagtttataagtagagttgtattattaattttattagatattgttaaatggtttttatagtggtttttttggtttacgtttttatttattagaagaaagtttttgttgttttggagttttagtaatatttgatatttttaaatttgtttttgttaatttaatgaatgtcgttttgttattttattattttatttttaattttattaattttattttttttattttatcgttattttattttatgtatgtatgtatgtatttatttatttatttatttattttaagacggagttttattgttgtttaggttggagtgtagtggtatgattttagtttattataatttttgcgtttttattttttttttgggtttaagtaatttttttgtttttgttttttgagtaacgggaattataggtatttgttattatatttggttaatttttgtatttttagtagagatggggttttattattttggttaggttggttttgaatttttgattttatgatttattttttttagttttttaaagcgttgggattataggcgtgagttattgaatttagtttttgtcgttattttaatttgtttttttttgaagtttaaaatgttagtattaatttgtattttttattttttttttgagggattgttttttttatatttaaattttttttttttttgggttggttgttttttttatatcgatttgtggagttttttgtaaattttagatagtaattttttattggttatatatttatatatgatgtagtttgttatggtatggtttttattattaatttaatgtttgtaaaattagtatatttatatatattttaaaaggtataaaaagataattaggggttgggtacggtggtttatatttgtaattttagtattttgggaggttgaggcgggtagattacgaggttaggagatcgagattattttggttaatatagtgaaattttatttttattaaaaatataaaaaattagcggggtgtgttggtaggcgtttgtagttttagttatttgggaggttgaggaaggagaatggcgtgaattagggaggcggaggttgtagtgagtcgagatcgtattattgtattttagtttaggtagtagagtaagatttcgttttaaaaaaaaaaaaaaaaggtaaaaaaaaaaaaattaggatttttttttttttttgagatagagttttatttttgttgtttttaggttggagtgtaatggttcgtttttagtttattgtaatttttatttttcgggtttaagtaatttttttgttttagttttttgagtagttgggattataggcgtttgtttttaagtttagttagttttttttgtatttttagtagagatggggttttattatgttggttaggttggtttcgaatttttgattttaagtgattcgtttatttcggttttttaaagtgttgggattataggtatgagttattgcgttcgatttgataaagatttttatgaatattaatatagtttttaatagtttaaggttatatttttaggatgattttaatgttttttaaagtgtttgattgagagaatttaaggttgttaaaagaatgtattgtttgttttagtttatagatgaaggtaaggtttttgttttttagttgttgtgagagtgtaggagtttaatgataagttttagttaataaggttaggtgggtttaatatagattaattttttttttattttttgtaatttgttatttttttgacgttattgagtttttatttattttttttgtttttttatttttgttttaaaatgtttagttatttttataaattaaagttgagtttagtttaagttaggtttttttttttattgtaataatatgttattgattaaaatttgtttttattattttatttatttatttatttatttatttatttattattttgagacggagatttgttatgtggtttaggttggagtgtaatggtataattttggtttattgtaaaatttgtttttcgagtttaggcgatttttttgttttagttttttgagtagttgggattataggtgtgtattattatgtttagttaatttttgttttttagtagagatggggttttattatgttggttaggttggtttcgaattttttgttttaagtgattcgtttgtttcggttttttaaagcgttgggattataggcgtgagtttttgtgtttgttttgtttttattattttagttagtgtttggttttgtttatttatgagatgatttagtaattttatttttaggtatatatttacgaaaaatgaagatatatatttatatagaaatttgtatataaatgtttatagtaatattatttataatagttaaaaggtgaaaatagtttaaatgtttattaattgatgaatggataaataaattgtgatttgtataggtaatggagtattatttagttataaaaaggaatgttagttattagggaggttgagatgggaggattatttgagtttgggaggttgaggttgtagtgagttatgattatattattgtattttagtttgggtgatagagtaagattttgttttaaagaaaaaaataaatgaaaggaatatagggagtgatgggttgagcgtggtaattttagtattttgggaggttgaggtaagaggatttttggagtttaggagtttgagattaggttaggtaagtaatatagggagattttatgtttattaaaaataaaaaaataaaaaaattagtgtttcggcgggggcggtcgagggggaagagtgtgtgtttgcgggagaaagaggagaattatttaagcggttttagaagttttagggagtggaggtttttgttatggagtcgtgtggtgtatgtgtggtaatattatgtttgtgtttttgtttaacgatgttgttatcgtgtttggagttgagcgggaaacggtcgtggttatttttttatatggatttggagatatagggtatagttgggttgacgttttttttattattcggtttttttacgttaagtatatttgtttttatgagtttaggatttttgtgatttttaatatgaagatggtgatgtttttttggtttgatttgatggggttgagtttagatgttttagaggacgaggttggtattaagaaggtagtagagaatattaaggttttgattgagtatgaaatgaagaacgggatttttgttaattaaattattttgggaggttttttatagggtcgggttttgtttttttatatggtttttatttgtttttattttttggttggtattttggttttgagttgttggtcgtttttgtatcgggtttttttttaggtagttaatggtagtgttaaggatttggttattttttagtgttatggggagttggattttatggtgttcgtacggtttggggttttgatggttgagaagtttcggtttgttgttatatttgttagggtttagttttagatatatttgggtgttatgtatagtttttgtttttaggagatggtagttgtgaaggaattttttgagaagttgttgttttttgtttaattagtcgttggttttagtgtagtattttagtttatgggggatttagtaagtaagtatggtattattttgggtttgagttggtcgagtttttgtttttattttttttgatttgttttttttttataggtttttaggggtaggtggtaaggtttggttgggtttttttttttggttttagttatttggttttgtttgtagtaggggtaggttgtttttttattttatttttttggaggcgggtttttttggtagtagtattggaggggttataggtagttggagaaagaggtttagttattgatttatttatttaggattttatttattagttttattttgggtttttttttgtaattttagggtttggtttatggggtttttttaggtttttgttttaattgattttgtttagataattttgtgttttttgtttttatttagttgttttttagttatgaacgtggttatggtttcgggggtttttttgttgttgtgggttttttgtttttgggtaggagtgttggtgaggaggtggagttttttgaggggggtttttttttagttgtttttttatattggggggttgggttttgttttttcgttattttttttttttgtaggtttggagtttgtagggttggattgaggtttaggtttttttttagttgttttatttttattttgtttttattttagagtagggaggtagtgggggaggagttgtgttttgttttttgtttttatgtggtttttgggtgtttttttttttgtgttttggattttgataaaattaaagaaattgtttttttaaaaaaaaaaaaaaattagtcggatatggtgattcgtgtttgtggttttagttattcggaaggtaagaggttggagtattatttgagtttaggaggcggagattatagtgaaatatgattatattattatattttagtttgggtaatggtaagattttgttttaaggaaagaaaaaaaaaaaggaatgtggtagtgatatattatatgttataacggtgaggaattttaaaaatattatgttaagtgaaataagttattatttatggattttttattttttattgttaagttagtattgtatataaatatatatatatgtttatatatatagtttggttttatttgtaaaatttttatttaggatttttttaggtatgtttgttagtgagattagtttatagttttttttttttttattgtttttgtttaatattgttatagaggttatattaatttttttttttgagataagagtttcgttttgttatttaagttggagtgtagtggtataattttagtttattgtaatttttatttttaaggtttaagttatttttgtgttttagtatttcgaatagttgggattataggtatgtgttattatggtcgtttaattttttaaaaaaatgtttttaaatttttagtagagatggggttttgttatgttggttaggttggtttcgaatttttggttttaagagatttattcgttttggttttttaaaatgttggggttataggtatgagttattgttattagattaggttatattaagttttataaaatagtttgaaagtatattttttttttgaaaggtatttttttttttttgtttgtttgtttttagtttttttttttttgtttttttttatgtttttgagacggagttttgttttgttgtttaggttggagtgtagtggtataatttcggtttattgtaatttttgttttttaggtttaagcgatttttttgttttagttttttgagtagttgggattatagacgtttattattacgttcggttaatttttgtatttttagtagagataaggtttttttatgttggtttttttaggttggtttcgaatttttgatttcgtgatttgtttatatcggttttttaaagtgttgggattatagacgtgagttattacgtttggtcgtttgttttgtttttaatgttggttataattttgtatttaggtaattattttatgaagtatttttttgttattggaagtaatttgtataaaatagtaagttttttcgtttttatttttttacggggttaatttttatttattttttagtttttattataaattttatattgttagaaagggttttgtttttttttttattagattaggtgtttttgttttatgatttttagtatattttattgtgatgttttattaaatgttggtatttttagttggattttaaattatatggatagggatttaatttttgtttattattattttagtgtttagtatattgatgttataaaattggttattaataaatatgtttggcggaatgagtgaaagaaatacggtaaattggaatgttttgggaagtttttttgttttagaataaaggagaagatcggaagaaagaagggttatagtttagttgtggaagtagagttttaggtaaggaggtgttagtgtagttttggtttttttgtgtaggagttttttataaagaggttgagttgtgttagtattaggggttttattattataggaggttagtgaagtttgggagttttggtagatgtagtagaggtggttttgaatatttggagattttgggatggttatttgggagttagtagttatgtagggtaatggggaagatagtagcgatttttggagattggttttttttaaagatagagagaggagtttgggtaggattagattttttagtttttttgttttgttttgtttttgtttttgttttgtttttttttttgagacggagttttattttgtcgtttaggttggagtgtagtggtgcgattttggtttattgtaagtttcgtttttcgcgtttatgttatttttttgttttagtttttcgagtagttgggattataggcgtttattattacgtttggttaattttttgtattttttagtagagacggggttttagcgtgttagttaggatggtttcgattttttgatttcgtgatttattcgtttcggttttttaaagtgttgggattataggcgttagttattatattcggtttaagttatatttttaaaatttttaaatttatttaaggtacggatagtttagtggtttttgtagggttttggagaaattttttttattaggttttgattttttggtttatgttgggtaattattttgtttagtttgtatttgtattttagtattaggaagtgttttaggttgaggaataagaatttattatttattggaaaaattaatgttttaggtattttagtttatttattagtttcgtgtgattttggttagcgttagttagtttttttgaatgttaataattttgaatattttggtaaatagaattttaagttaagttatcgttggattttagtgataattattagtttttaatattagatgatggtttgtttgtttattagtaaattttgattgagtattttttgggggtagattatggttgggtttgtttttggtattaatttagataaatatttttatgtgatttagatattttaatttatagagtggatttgagagttgatggtttagattagttatttgttaaattttttttttagtattttaaaggagaatagagtaatgaagggaggaggtatttgagagggtttgatttaagtaagtaggtttgattaaattgttggatggagttatttttattataatatttttttttgagtaaagttggggtaattttaagataagttttataattgagtaggggtttttgggagttgatttttttttgagttgattagttatcggttagattaaggttatattggtatttttttattgttatgtatagattttttatttttttattatgagggtattttattattttattttttgaataaattataagtatataagatattttagttttacgtaagtttggaaggtaggataatataatggtgggtaaaagtatgtgttttggagataaagtttgagattaaatttaatttttagggagtttttttgaatttattttggtttagagggttgtttgaaaaaataataaaataaaaaatttaaattttcgtttttatgtttttgggttttatggataaatagggttaataagagttttgtaataaggttgggcgtggtggtttaagtttgtaattttagtattttgggaggtcgaggtgggtagattatttgaggttaggattagtttggttaatacggtgaaatttgttattattaaaaatataaaattagtttggtatagtggtatatgtttgtagttttagttattggggaggttaaggtgggagaattatttgaattcgggaggtggaggttgtagtgagttaagatggtattattgtattttagtttgggcgataagagtgaaattttattttaaaaataaataaataaataaaaataaaaatagagttttgtaatagtgaggatgtatttagatgaaagtaatagaaaatttagttaataatgttagttaataaagatatttaattgttttatattttaaaaatgttcggaggttagtagttagtaagttttttaacgatattatttaagatttagggtttttttattttgttttattatttttggcgtgttggtttttggggttttttgtgtgatattttattgatatttttggtatatgggaaatattatttgtttttggattttttagattaatttgaggatattattttttgggggtaggtagggttttgtggtggtttggattgttatttttaattttttgttttttttttattatttaagtgtatatttattttttttgttgtgtgatttgtttgtgttaatagaatgttagaggatacgatgtaagtagatgtttttaatgtgtttttgtagtttggtttggttttttgtatttttgtgatttgataagagaaaggtaaattttagatatttattgtttttttagttgtgatttagaatagatattggattaggattaaaggagttttattaagttttgttaagtttagtttgattagataaattatagataatttataaatttatgagtatgaaaataaatagagtggtttaagtaattttttggggataggtataggaggatagtaagggtttttgggtttttagagtgttttttagttttttcggtttatgagttagtatgtatttggttatatttattttgggggtttttggttaaagttaatatttagagtttttcgtggattttttggttggatttgattttattggtgttttttggttgatttaatttttttgtggttttcggtagtttagtgggatttttgaatttttattatgttttttatttagtttttaattaagttatgtaaattatatgtttttgttgttaggttattttttttttattttttatgttttatggtaggtttatggtttttaatttaatatttattattggaaaagggttggtaatataaaatagattttgtttttttgttagtgtattttgatttgtttatttatttataatgggtaaaattttgtagtagttttagtgattttttttgttttttggatgtttttgaagttatttttttaattttaaggtatttttttgatttttatttttttgttttcgttttgttgaaattttaagatgagaagtggtaggttttttttttattttttttatattttatttttggttttttagttttaattgttattttaaaagataagggttttttttggaaataatttgttgaggtagttgttattatttttattatggatatataggaaattaaagatgagagattaaattatttttttttttggtagaaatttgattttagatttggtttttgattatgttaaatgggagttaaatgaatgtagaaaataattttttttttatagtttagtttttaagtttattgttttgttgtaaaattttattttgaattttaatagatgtatattattatttttttttttttatattttttttgaaataattttaatttttttataagtagtttgatgttataattaaataagaaagaggttatttatttgttgaaggtaaaagagtataaaaggaaaaaatatattaatagtttttttatatattatttattttagttttttgtttttatttgatttttttattgtaaagtttggagaatttttatttagttttttgaatgtgtgtatgtatatatgagaatttatggttgtatgtaagagtgtgtgtgtatgtatgtattgatgagagtgttgagaaaaggaattttttatttttttttttttttttttttttttttttttttttttgagatagagttttgttttgtcgtttaggttggagtgtagtgagtttattgtaatttttgtttttcgggtttaagggatttttatgttttagttttttaagtagttgggattttaggtacgtgttataatattcggttaatttttgtatttttagtagagacggggttttattatgttggttaggatggttttaaatttttgattgtaagtgatttattcgcgttagttttttaaagtgttgggattataggcgtgagttattgcgttcggtttatttttttttttttttttttttaatgttataagtttttgaaattttaaagttaaaaatttgatttatttatttataattggtattatattgttatttttttttttaggtaataaagttagaattattggttttttttattaagatagggaattaggttataaggattattaaaaataaaagataataggttgttgtttttaaaattttatatttttaggatttaagttagtggtaatagggagggaagagaggtatttggtgatttaaattaattgttgttgagttgtttagttttttggtttttttttgattttttggaattattattttgataataataaatttttaatgtaggaaaataaagttaggattttttttgagttttagttatatgttaagcgatatgtgatgtatttttgtgtatattattttatttttttttaaagtaattttttatagtaggtattattatttttattttttatttttttttttttttttttgaggtagggttttattttgttatttaggttagagtgtagtggagtaattattatagttttaaatttttgggtttaagtgatttttttattttagttttttgagtagttggaattgtaggcgtgtgttattatgtttagataatttttaaatttttttgtagagattgggattttattatgttgtttaggttggttttaaatttttggttttaagtaatttttttgttttcgtttttttaagcgttgggattataggtatgagttattgtatttggttttatttttattttttaatgatgagatagggtgtataggttgaaagaggtagaataatttttttaaagtttaatagttaaaatatgaaagagtcgggattcggtcgtttcgtttgggaagtgggcgtttttgttcggttatttcgtttgggaggtgaggagcgtttttgttaggttgttttgtttgggaagtgtacgtaatagttttgaagagatagcgattatcgagaacgggttatgatgacgatggcggttttgtcgaaaagaaaagggggaaatgtggggaaaagaaagagagattagattgttattgtgtttgtatagaaagaagtagatataggagatattattttgttttatattaagaaaaatttttttgttttgggatgttgttaatttataattttatttttaattttgtgttttttgaaatatgtgttgtgttaatttagggttaaatggattaagggcggtgtaagatgtgttttgttaaatagatgtttgaaggtagtatgtttaagagttattattattttttaattttaaatatttagggatataaatattgtcgagggtcgtagggatttttgtttaggaaaattagagatttttgtttacgtgtttatttgttgattttttttttattattattttatgattttgttatatttttttttttgagaaatatttaagaatgattaataaatattaaaaaaaaaaaaaaaaaaaaaaaaaaaagagtaagagtcgggatttaaattttgttttttggtattgttaattttatcgtcgtttttttatattgggtgttttttgagcgattgtgttaatattatatggagaggattttataaagatgattatttttttttttgtgggagtttttattttattttaattttttgagataaggtttcgtttcgttgtttaggttgggttgtagtggtacgattttggtttattgtagttttaatcgttttggatttttattttgatttttagagtagttggaattataggcgtatgttattatttttagtatttttttgttttagtttttcgagtagttgggattataggcgttcgttattatagcgggttaatttagagacggggttttatcgtgttagttaggatggtttcgattttttgatttcgtgattcgtttatttcggttttttaaagtgttgggattataggtatgagttatcgcgttcggtttgaagttttttagttatagtgtttttaaatattttataaaaaagtaaaataaatattttttattgttgcgtttattttttgaagatgatagtagttggtagagtttgtttattttagtttagttagtatttaaatatggttataggagagcgttttttattagcgggttttttttttagggttttgtattttaggttgttttatatttttttgtttattttaggttagtaaggtcggggtgtatatggattgttttttagttttttttttagggggttaggggagataaggaattgtttgttaattgagatatgtgaggggtggtagggaagggtagaagtaggaaaagtagtagtatagtaagtagtaggttattttttgggtatagttattaaggtaggtgattatggtgaggaggatttttaggattgggttggagttgtttgtagttatttggggatttagtttgcgttttttggtttttttttcgttattataaatttagaaaggggtaatttgtttagattgttagtggttaaatgggtattttatggtattttagtattttttttgttttaggtttttgtgggtagtaagaaagttagagttatttgggataaaatcgaggaggtagtatgtaatttttttttatattttagggtattagatatgagttttaaatttttttttaaataattgttattatgtttaattttttattttttatttttaaatttaattttttcgtaaagtaattttttttgattatttattttattttgatttattttgattttttgttttattttaatttattttgattatttgttatttgttttgttttgattttcgttaaagtatttatttcgttattttttttaaattagttagttagaattagtttagtttgtgttgtttaattttagttaataggggaacgaaatagtagtaggggttacgtgtattagggataagaattttttttttttttttgtttaagtgtgcgtttattattgttttatttgtaagggtgtatttttttatatagaagtatttagttttgttgagaattaaaaggaaaattttatatttgagtgatattttttttgcggtatcgaaattttatatataataatttgggggtttgtttgggattatatttttttttgggggtggtttttggtttttttttttgaggaggtgaatttcgttttattgtggcggttttaggcgtgaaaaattaagatttatttagtgtaaggaataatttaagtttttagtaatgtaggaaaaaaaaaaaaggttattaattttttggggtgattagatttaatattaggtcgtgggggttacgaagtttagtagagttaaaggaatgagaaaatataagtttagagagaaagtgggattagggggttaatattagtatggaggttgtaaaggttcggagttttggaagtttatattatttattggtgattaaataaatagggggtgaggatgtgggggttgaaaggaagcgatgtattaagttaatgaattatagatgtgatggtttagtattttttttgaaatgtatggttatttgagataatgggagtgttagaagtaagaagttagtaagtttggatatattttaaaggttattaggggtgttattttgaatgtaaaattattgaagaaataatttatgtgtaagatgtataaggaaagtaaaatatatttttagtaaaaggattataaggaggtataagaatgtggatttttatttatattaaaaggttaaaaaaaaattttgtggttaggtatggtggtttatatttgtaattttatttagtattttgggaggtcgaggtgggtggattatttgagattaggagtttgagattagtttggttaatttggtgaaatttcgttttaattaaaaatacgaaaattagttgggcgttgtggtgggtatttgtaattttagttatttatttaggaggttgaggtaggagaattatttgaacgtgggaggcggaggttgtagtgagttaagatcgtattattgtattttagtttgggtgatagagtgggattttattttaaaaaagaaaaaaaaaatttgttttgaaggtttaagtaagttttaaaatgttaattgtaatggaaattatgtgtgtaaatatattggttaaggttaaaagggtattatttagtttttttgtgaattgagtattaaaataaaaatataacgggttttttttaaagtattaattcgttgtttaataaaaattataaaaagttaaaaataggttaggtttagtggtttatgtttgtaattttagtattttgggaggtcgaggtaggtagattatttgaggtcgggagttcgagattagtttgattaatatggagaaatttttatttttgttaaaaatttaaaattagttgggtgtggtggtgtatgtttgtaattttagttatttgggaggttgagataggagaattttttgaattcgggaggtagagattgtagtgagttaagattgtattattgtattttagtttgggtaataagagtgaaatttttttttaaaaagaaaaaaaaaaatagtttataaaaattttattttatgggtcgggtacggtggtttacgtttataattttagtattatgggaggtcgaggtgggtggattatgaggttaggagatagagattattttggttaataagtaaaattttgtttttattaaaaatataaaaaattagttaggcgtggtggtgggcgtttgtagttttagttatttgggaggttgaggtaggagaatggcgtgaattcgagaggtggagtttgtagtgagtcgagatcgtgttattgtattttagtttgggcgatagagtaagattttattttaaaaaaaaaaaaaaaaataaaaaataaaaatttattttatgattagatattaaaaattggataaatatgtttataaagtgttattaaaattaagtttaatattaataggtcgggcgcggtggtttacgtttgtaattttagtattttgggaggttaaggcgggtagattgtttgagtttaggagttcgcgattagtttgggtaataaggtgaaatttcgtttttattaaaatataaaaaaattagtcgggcgtggtagcgtgtgtttgtagttttagttatttgggaggttgaggtaggagaattgtttgaattcgggaggtagaggttgtagtgagttaagatcgcgttattgtattttagtttgggtaatagagtgagatttcgttttaaaaaaaaaaattaataatatattaatataaaggtgaaatttagtttatttggtataaaaattatataggaagtattgttaaatataaaatggtgtttggcgttttttggtttaaaaaaattaataaaaataagtgttaaaggaaattttttagtaagaaggtattaaggattataaagtttattgttgatgtttttatatttaaaataaaaggtcgattttttagaaattatatgtttggtttattttttattttttttttttttaaaattaaaaatattttagtataggtattatttttaaaatttttggtaaattagtattagtttgaagattatgttgttattagagggtggaaagaaggaaaattcgagttagtttgggaaggattttattttgtgttgttaattatcgagattgtagtttgtatagcgaaaaagggatggatttattatattcgagttaagaaagtattattttttttagagttgtgggttatagttttagggggaaattttattaaattaaagttaagaaaaatttaatttttttatttattttattattttttttttttttttcgttttattgttgattatttagttattaatataattaagttaatttcgttttaaattattgtatttagtgtttgttttgttatatttcgtaggaatttgttaagttaaagatagttttttatttttgaaaagtatttttgttttttttgattttttttatattgggtattagtaaattaggattattgaattcggggggatttcgataaagattttaatgttaattaggatttttgatttttaatgtagagtttttatgtcgtagtcggtttaacgttttgtggattattaaagagtaagtatggattgttttaattagtttttgtaattttttaaaattatatatttattttattagaggattatagaagttaaagatttaaaaaatattttggtaattaatataggatattaagatgtaaatgtttggttggaatggattaaatatttcgtttatattaaataaaagtaattgttatgtttgtgtatatggtaggttagaggtttagattgttttttttttattaaggtggttttttagtcgattaggtgtgggttgtatggtagtttttttttaggattttatagtttggagtaataatttacgttaagttttttttttgttatattttgaagttcggtattttgcgcgttagttttcgagggttatttagtttttgttttttaatattaagtttatttcgtgttttttttaatagggaggaaatttagtattttttggagatttgaaggatgtagtgagtttaagaatttttaagagtttattaattagttagtttttgtttattttcgagtggatgtgtggtggtattgtggtggatttttattggatattgttaaataattggaatggtatttgtgttttattttaattggttattttttttattttgttattttattaacgagaggaaggaaaaataagtattataaagtaagagaagttttttatgggtttttcgatttttacgtttatttagatataattaagagttttatggggaatattagattaatttaaagtttaaaattaaattgttgtaggatttaagttaatattttggtgggtaataattaataaaagtgtagattgggtaaattacgtttattataattaatagcgatttattaattatattagagatgttgttagaggaatagttgaataattaggggttattagttagacggtttaggaaaatagtgttatcggcgtttgtgtgaagagattattaaataggttttgtgtgagtaataaagttgtttattttatttgggtgtaggcgggttgagttcgaaaagagagttagtaaagggtggtgggattattattagtttttataggtttgggataggtatataaattatatttttaagggtaggggagaatattataaagtattttcgtaagggtgggggagaatatatttattagttagggtgggataggaataaattataatggtggaatgttattagttgaggttatttttattttttttgtggatttttaattgttttaggttatttggatgtatatttgtaggttataggggatatgatggtttaatttgggtttagaggtttgatatttttatttttttatattaataaataaaatagtggtgaagtgttggggttgcgaaaatttttggaggtggtatggagagataatgggtgatgttttttagggttttttcgagcgggattaggggcggtgtgggagtttagagtgggagatattaagttgaaggaagattttgtggtaaggggtgatattgtggggttgttagaaggagtatttgttgttcggtgtggtggttgacgtttataattttagtattttgggaggttgaggcgggcggattatttaaggttaggagtttaagattagtttagttgatatggtgaaattttatttttttaaaaaaaaaaaaaaataaaaattagtcggatatgatggcgggtgtttgtaattttagttatttaggaggttgaggtgggagaattgtttgaattttaggaggtggaggttgtaatgagttgagatcgcgttattgtattttagtttgggtgatagagtgagattttgttttaaaaaaaaaaaaaaaaaagaaaagatagttggaaaagaatggttattatttttaggaaaaaaaaaatggttgggtacggtgttttacgtttgtaattttagaaggagtatttgtcgtatataatgattggcgatggtttggatatagttttggatgaattgagagattaaacggaagatataaggttcgaataagggaaggagaaaaataggtattaaaggattaagaattgggagtatttaggatatttaattagagagtgtttaagggggtttagagtaattatttgtttggttggcgagtttttggtttttatttttgagtttttttatgttgttatatattaggttagattgatttaggtaaaaataatattttttattaaaaaatatatagagttttttttttttagtagtgagtaagttaaggtttcggtggttttggaggataattgtagttaaagagttaatttgggtttgaaggattgataaagtttgtgatatgtgtgtgatgttagtagagaagttattagagaggttatggaaggtcgtgatagaggttgaaatgtttattattttagtatcgagagtaatagtggaggtagaaagttttaaatcgataagtaagggaattagcggaataatttttttttgttgtgtcggtgttatgaggggaataggaagatgtttagttttatttgtaaattgattttgggagtaaggaaaattagtgtgtatgtgtttgtttaattagtaggtagatatatgtaggtagaggatttatagaggaagaagagattttgtgcggagtaaaatcggaaatgtaaagtaaaaagatgagaaggagtgttgaaagaggtgttttgtatttagatttttagggatttagttagggcggtagtcgttagaggttgtaatggggattgatggggtaattacgtagagggggaggtttgatttttatggtgtatgagaaaattttgagtgtttacgagtaattttttattgttatttacggggttgagtataagtaaataagaagagggtttgggaggagagtttgataagtaaggggaaggtagttaaggatggagtgaaatatagggtaagtgtttttttaagtaataataattgttaatgtgtttaagtttgttagtattgatagagggtttatttgtaatatagagttgggaggttttaattgttttagtgatgtgtgtagttgggtttcggagatgaagagtaaaggaatatcgagaaggtgaaagattatttaggggaattttagtgggtttttgtcgagagatatataaaggaacggttataggaatagtagtttgtgttgtgaggggtttaaatatggggggagtagagttgatataaggagaaaggttttttaagtaagtgtggaggagggcggtagtttgttgaagtgaaatgtttggggaagttttgttggatttgtttagaaagtaaagaagttttttaggaaggtaaaggtgagggttgttaaaggaagtttggaggtgtagggagataggagaggttgtttagtttgtatgtaaggcggggatagttgtgtaggcgtaggaagaaagggaaatgtaaatttagtaatggttcgatgagggattagaaacggttaggagagagtgaatgagattgatagtgtggtggagttagttggggagaggtagagggtggtataaaaatgggaataagaataggagtgagtataaaagtaaagaataggattttattagggtgaaagtattggagtgtgttttgttagtaaatattatttatttattttaagagggagttaagagtggcggtttggggatagtattaggagatattagttgtgacggtttggagaaatagtgtaaatcggtagtgtaaataagagtagggtatttatgagtagttgagaatggtgaataggagtatgattagatagaagatagaagggatgataagtttttggggtgtagttcgagttgggttggtgtttggaataagattggggtttaataaaaaggagtatttatataggagtttaaatgggttgtattttgtagtatttcgaggataggttcgaattttgagaagggtaagtggtaaaagtattgtttagtttttttaagttggaggttgagtttggtgaggtgtgtttttaaaagattattagtttgttttattttttttgaagattgaggatggtaaggggtatgaaggttttattgaatattaagagtttgagaaattgtttgggtgatttgattaataaaggttagtttgttattggattgtatagaggtgggaaggttaaagcgaggaattatgtttgatagaagggaagaaatgatcgtagtggtttttttagattttgttggaaaggtttttatttatttagtgaaagtgtttatttagattaagaggtattttagttttttgatttggggtatgtgagtaaagttaatttgttagttttgggtaggggtaaatttttgagtttgatgtgtagggaggggagggagtttgaatattttttgaggagtagtagaatagtagatggaatattaagaagtgatttttttgaggatagatttttacgatggaaaggaaatgagaggttttaagaggtgggttagtagtttgtaatttatatggaagaggttatgaaatgatagtagaatagaatgggtttgtgaggttgttaggagatattttttttggtttaagaattatttgttttgtgtgggaagagattgataggtagaagttttagtaggagagtaggtgggagtgatttatgagaatgagaaaaattggtcgtgagggatagaatttggaatgttagttgtttttttagttattttattagtaaaagtattgttttgagcgatgggatttgacgttttttgatggtttttggagtaaatgattttagttttttttggaagtaaagcggttttgagaagagtttttattaaagaggtattaatgatagaggatttttgcgtagtgaggaaatttttttttgtttatataataatatggtggtgtaggatatggaaggtatatttagagttgtataaatattgatatgtagtttttttgtaaaagtgagggttcgagttaaggtaatgagtttagtttgtcgagaggtagtggagaggggtagagtagtagttttaatgatagatgtggaagatattatagtatagtttgtttttgttggtgtgtggtaattaggtttggtagaattattattaataaattaagtgtgattagggtgaggaataggaaagaaggaaatacggggaaatggggtgaatgttaggtggattagagagatatagttatgggggttaggtgtggtattaggaataatgtgggaggttggattgaagttttggttaggaataatggtaattgtgggagatttaataaagaatgagtatagttgaaggagtcggggagtagaaagtatacgtgttagatgtgaggaagaaaatagatttatgagaatcgtagagagtgagttgagtatagtttgtgattttgagggtttgtaaaagtattagggtagtggtaggtattgtacggagatatgatggttagtttaaaatagtaagttaagttgtttggataaaaaggttatagggtgcggttttggtttttgtgtaagaattttgattgtatagttttgtatttcggttgtgtgtaatgaaaagggtcgggatgagttatggagagttagtgtgggagttgtgttttaaggaatggaaaggggagaggagaaaggatttaggatttatggggttagttaggtttatttagaatagaataatgggttgtggagggaggtattgaggataggagagtatatgggtttggtattatagggtggataggtaaaataatttggtcgatatggcgtagattttgaattaatttgtaaggtttatttggtttttggataggtaaaatgggggaattgtaaggagagtttataggttttaaaaggttatgttgtaataggtgagtgataataggatttaatttttttaaagtatgttgtgggatgggatattggtattgagcggggtaagggtgattaggttttaatgggatagtaatgggcgtggatagtttattagggagggagtagaggtgttttatatttgtggattaaggtgaggagataaaagagaaggacgtgaaggaggttttgaattggggaaaagggtagtaacgaaatgtggttgtagtttaggattagttagggaagtagataatttagttaaaatgtttcgatttaataagggagttgggtaggtggggataattaaaaaggagtgtataaaagaatattgtttaagttggtattagagttggggagttttaagaggtttagaagtttggttatgaatatttataatagttatggaggtaaaggaaataggtttttgaaaagaaggtaatgtggagttggtagtttttatattgattaagaagggtgatttattttttattgtaagagttatttaaagtgttcgtgatggttcgggaggtttcgaaggtgatcggatagtattagtttttagtcgttaagttgagaagatttgggaaggagttagttagagagttttgggttagagattttagagttttgggagtgattgcgaggcgagtgggatagtttgatttttagtggggttttgtatagatgggatacggtttaggaggaatttcgggttgtgggtattttttggtttagtggttagatttttggtatttgaagtaagattttgatgaagaaggttttgtaggaatgtttgattattgcggtttaggtatgtgcggtttaggtattttgaagttttcgtgtgttggaggtgtagttgggttttgttttatagtagaggtaagtaattgtaatttttttttattattgtatattttgaaggtaaggttaattaagttttgttgtggggtgacgtgtatttgtaattttagttatttaggaggttgaggtaggagaatagtttgaattagggaggtggaggttgtagtgagtcgggattacgttattgtattttagtttgggcgatagagtgagattttattttaaaaaaaaaaaaaattattttttgtttattttttgatttatgataatcgaatttttggtatttttcgcgtgggttttgtttatttgatggtagttaggattgttttttatcgggattttttgaaaattgatgagtttttttttttttacgtataattttaaggcgattacgtcgggtgtattatttgtagagtttatagtttgtagtgaacgttaagaatgagtttttagataattttagttgagtggggtcgggggaatggggggggtattttttttaagagaattcgttttagtattcgtttgttaagtatttattgaaagtgtttgttaaattataaatatttattagatggttttttgaggtcgggtcgtgagatatttgcggtttcgtaaaagtatttaaatcgtatttttaggaggttgtttttagcgttttttattatattatatattttattttttgttttgtttttagggttaaggaattttatttttacgtataaataatatatatatagtgttttagtatttttttatgtttcgattttagatgttatgtatataagtttgaatatgttgttgtgtattttttatatttaagtgtttttatttttttaaatatgttgtgtggggttagtttttttattgtttatgaaagataatttaggtaggttatagagtatatttgtttaatttttggaataaaaaaaaaaaattttttaagtattattttgaattacgttttttttttcggttagtttcgattgagtggtttgatatgggaagttgttagtgtgaaattggtagagtggttggtttttttaagaattttttttttgtttttttgtgtttgattttttatttttttttttatagttagaagtagaggaggtgagggggataaaatgttttatttgacggttatatattggaagtggttttggttttttttggttgtggtggatgtttaaattgatttttgtttttgtgcgatgtttgtgtgttttttataaatttttagtagttgaatattttttatttatattttgtagtttaaattttgaattatattattttattttttaatttttattttaggtttaggggtatatgtgtaggttttttatataggtaaagtgtgtgttatggggttttggtgtataggtaatttaattatttaagtaataagtatagtatttgataggttttattttgaatttgtttaggtgttagattggtcgtagttttttattattttttgttatttgaggtttttatagtgtgttttggtggttagttatttttattaaaaggtagagtttaggagggtatggtggtttttatttggaattttagttatttgggaggttgagataaaaggattatttgaatttaggaggtcgaggttgtagtgaattatttatgtttatgttattgtattttagtttgggtaatagagaaagattttgttttaaaataaataaaaaaatatggtaaaattttgtttttattaaaaatatagaaattagtcggtggtggtatgtatttgtaattatagttattggttgaggtatgagaatggtttgaatttaggaggtggaggttgtattgagtcgagattatgttattgtattttaggttgagcgatggagagagattttgttttaaaaaaaaaaaaaaaaaaaaaagtttgataatatatttagttgatggggtggggaaaggaaattggtattgttatatattgtcgataggaaggaaggtatattggtgcggtttttatagaaagtattttaaaaatatttatttaaattaagtatttacgtattttttgatttagtaattttattttaaagaatatatatttatattagatattttttttttgagatggagttttgttttagagtgcggtggtataattttagtttattataattttcgtttttgttttttaggtttaagtagtttttttgttttagttagttttttgagtagttgggattataggtgcgtattattacgtatagttaatttttgtattttttgtagatagggttttattatgttagttcggtaagttttaaatttttgattttaagtgatttatttgttttggttttttaaagtgttgggattataggtgtgaattattacgtttggtttatattggatatttttgagagttaagggagtattataataaataaggggtcgggtgcggtggtttatttttataattttagtattttgggaggttaaggtaggtggattatttgagtttaagaatttgagattattttgggtaatatattgagagaatttatttttattaaattaaatttaaaaaaaaaaaaaaaaaaagaggttgggcgtggtggtttaagtttgtaattttagtattttgggaggttaagttagaaggattatgaggttaggagttcgagattagtttggttaatatggtgaaattttatttttattaaaaatataaaaattagttaggtatggtggtgtgcgtttgtagtttaagttatttgggaggttgaggtagaagaaaaatttaaatttgtgaggtgaaggttgtagtgagtcgagattgggttattgtattttagtttgggtaatagaataagatttcgatttcgaaaaaaaaaaagaaggaagtatttttttgtttgattttaaggtattaagtgaggaaaagtaaggaaaagagtagtgattatgtatttatatgtatgtatatatttatatatatatatttatatatattaatatatgtttatatatatagattttatttttgtaagtgtagtagatgtaggttggtgggaggttgatacgtgtataattttggatatttgttttaagagaaagaatattaaaagtattttagtattttgggaggtcgaggtgggtagattatttgaagttaggagtttgagattagtttggttaatatggttaaattttatttttattaaaaaaaaatataaaaattagttaggtacggtggtgagtgtttataattttagttatttaggaggttgaggtaggagaatcgtttgaatttaggaggcggaggttgtagtgagttgagattacgttattgtattttagttagggtaatagaacgagatttcgttttaaaaaaaaaaaaaaaattaaaagtataaatataaaattaggtatagattagtttggttaatatggtaaaatattgtttttattaaaaaaatttaaaaattagttaggtatggtggtaaatgttagtaaattttagttatttgggaggttgaggtagagaattatttgaatttgagatgtagagattgtagtgagttaagatttcgttattgtattgtaggtttcgtgatagagttttattatgttgtttaagttggagtgtagtggtgtgattatggtttattgtagttttgatttttaggttagatgatttttttgttttagttttttgaatagttggaaatataggtgtacgttatcgtggttttttttttttttttttttttttttttttttttaaattggggttttatttttgttgtttaggttggagtgtaatggtgtgattttagtttattagaatttttgttttttgttaagtgatttttttgttttagttttttgagtagttgggattagaggtatgtgttattatattaggttaattttgtatttttagtagagatagagtttattatgttgattatgttagtttcgaatttttgatttaagttgatgtgtttattttagttttttaaattgttgggattataggtatgagttattgtgtttggttattttttttttttttttgagatttttttttttttttttttttttgatagagtttttttttgttgtttaggttggagtgtagtggtataatttcggtttattgtaagtttcgtttttcggatttatattatttttttgttttagttttttaagtagttgggattagaggtgttcgttattatgtttggttaattttttgtatttttagtggaaatggggttttattatgttagtcgggatggtttagattttttgatttcgtgatttatttatttcggttttttaaagtgttgggattataggcgtgagttattgcgttcggttatggattttttttttttgagaggaagttttgttttgttatttaggttggagtgtaagtggtttaattttggtttattgtaaaattttcgaagtttaagtaatttttttgttttagttttacgagtaattgggattataggtatgtattattatatttagttaatttttttgtatttttagtagggacggggttttattatgttggttaggttggtttcgaatttttaattttaagtgatttgtttattttgggattttaaagtgttgggaatataggtatgaattatcgcgatcggttttggttaatgtttttttttttttttttgagatagagtttttttgttatataggttggaatgtaatggtgcgattttggtttattgtaatttttatttgttgggtttaaataatttttttgttttagttttttaagtagttgggattataggtgcgagttattatgtttcgttaatttttttttgtatttttagtagagatggggttttattattttggttatgttggtttcgaatttttgattttatatgatttgtttgttttggttttttaaagtgttgggattataggtatgagttattgcgttttgtttgttaatttttaaattatttgtagagataagtttttttatgttatttaggttggttttaaatgtttgggtttaagtaatttttttattttagttttttaagtgttgagattataggtatgagttatcgtatttggttaaaatttagattttataattgggtttaagttttttttttttttttttttttttttttttttgagatggagttttattttgttatttaggttagagtgtagtggtgcgatttcggtttattgtaattatcgttttttaggtttaagcgatttttttgttttagttttttgtatagttgggattataggtatttatgattatattcgattaattttcgtgtttttagtagagatagggttttattatgttggttaggttggttttgaatttttgattttaagtgatttggttgttttagttttttaaagtgttgggattataggtgtgagttattgtatttggtttaagtttttattttttatattttgttgattttataattttttttttttttttgatatttatttttttttattagtgtggaaatttattatagtttatatgaagttttttttttttgttttttttttttatgtttgtttttatttttttttttttatatttgttgatttttatttgttattattttttttttttttttttttttttttttttttttttgagacggagttttattttgtcgtttaggtcggagtgtagtggtttaatttcggtttattgtaagttttgttttttggttttatgttatttttttgttttagtttttcgagtagttgggataataggagtttattattatgtttgattaatgtttttgtatttttagtagagacggggttttatcgtgttagttaggatggtttcgattttttgatttcgtgatttattcgttttagttttttaaagtgttgggattataggcgtgagttatcgtgtttggtttttttttttttttttttttttttttttttttttttgattgaattttgtttttgttgtttaggttggggtgtaacggtgtgattttggtttattgtaatttttgttttttgggtttaagcgatttttttgttttagttttttgagtagttgggattataggtgttcgttattacgtttaattaattttttgtatttttagtagagacggggttttattatgttggttagcgtggttttgaacgtttgattttaggttatttattcgtttcggttttttaagttgttgggattataggcgtgagttattgcgttcggttatgattttttttttaatataatttatatttttatttttatttttagtttgattatataagtgttgtgtgatagaaaggtttggaataaatatataaaaaaaaaaaagaggtaaagttgtgaaattaagttgtatgtaataggttttatgaggatgggggaagtgtttgagaaataaaatagagtaagataatgtagttggaaggttttagttaaagttttttttagtcgtttttgttttttgttttatgttttaggatgtatgtgaattcgatgtaattgaaatttttttttttgttaataggcgtttttttgtatagtttatttatttttttattcgtaaatcgattttatatggttattagtagtttttttaggtaatttttttgaataatgtttgttgtttttttattaaagtaagtaaaagtatttttaatgatatttttaggatttgtgttatttaattttttattaaatatggtgaggaatatggtgaaatcgatgggttttggtgttttatttattatggtattaaggtatgtatcggtgggatttttttttagggaaataagtatattatgtaaattttttttgttgatgaaattatttttgttttgattaattatgttgaaggtttttttgaatttttgaatttgtgattggttaaatatggtaaatacgttggatgttgtgcgttgagggagttttttggtggttttggttttgtttttttgttttatatggtggttgtttaattttagcgttaaatattagaagtgggttgttttgcgttagacgatgagggaaggcgaagagtataatgttgtgtcgtttttatttttaattttgggtttttgtttatgtttgaagttttttttaaatatttggtgttttttaattgggtatttatatttaagatagagcgggttgggtgtagtggtttatatttataattttagtattttgggaggtcgaggtgggtggattatttgaggttaggagttcgagattagtttgattaatatggagaaatttaatttttattaaaaataaaaaattatttaggcgtggtggtgtatgtttgtatttttagttatttaggaggttgaggtaggagaatcgtttgaattcgggaggcggaggttgtagtgagttaagatcgtgttattgtattttagtttgggtaataagagtaaaattttattttaaaaataaataaattatatgtgtgtatatatatatatatttatatatataatatatatattttatatatattatatatatatattttatatatatatatttatttatttttttatttattttgtggttaggtgtggtggtttatgtttgtaattttagtattttgggaggttgaggcgagtagattatttgaggttaggagttttagattagtttagttaatatggtgaaattttatttttattaaaaatataaaaatattagttaggtgtgtggtggtgtatatttgtaattttatttatttgggaggttgaggtataagaattgtttgaattcgggagtagttgggattataggtatgtgttattatgtttggttaatttttgtatttttggtagagataaggttttattatgttggttagattggtttgaatttttgattttaggtgatttatttattttagttttttaaagtgttaggattataggcgtgagttattgtatttagttagatagttttttgtttttttttgttgtttttgttttgtttgtttttttgagatggagtttggttttgttgtttaggttggagtgtagtggcgcgattttggtttattgtaagtttcgttttttaggtttacgttattttgttttagtttttcgagtagttgggattataggcgttcgttattatgttcggttaatttttttgtatttttagtagagacggggttttatcgtgttagttaggattgtttcgattttttgatttcgtgattcgtttgtttcggttttttatagtgttgtgattataagcgtgagttatcgtatttagtttgtttttgtttttttgagatggagtttggttttgttagttaggttggagtgtagtggtgtgattttagtttattgtaattttttttttttgggtttaagttatttttttgttttagtttttttattagttgggattataggcgcgtgttattacgtttagttaatttttgtatttttagtagagatggggttttattatgttggttaggttggtttcgattttttgatttcgtgattcgtttgtttcggttttttaaagtgttagaattataggcgtgagttatcgtgtttagttgatagttttattttataatgttaatatttatataagatataagatttgttatattttttttttttttttgagatggagtttcgttttgttgtttaggttggaatgtagtggtatgatatcggtttattgtaattatcgttttttaggtttaagtaatttttgtgttttagtttttcgagtagttgggattataggtatacgttattatgtttagttaatttttgtatttttagtatagatagggttttattatgttagttaggttggttttgaatttttgatttcgttatttatttgtttcggttttttaaagtattgggattataggtgtgagttattgtattaagtcgatttgttatattttttgtagttatttaaattaataaggaaaaaaattagatgttaaataaaaatatatataaaatggtatataattttttaaaatgtttttaaggagtatgtaagtaagaaaatgtgaagattgatagattaattttagtgttgtttttatatttaagtaagaggagattttgtttggagttttatattttagaaggttttatatattataaatgttaaaagaataaatttggaaggaatatatgggtgtatttgttattgaagatttggtgtttaattttagtatagtgtatgagttatttattgttgtgtaataaattattttaaaattcggtggtttaaaataatatattgttatttgatggtttttgtgggggagaaatttgggaatagtttagttggattttttgtttcggaggtttttataagattgtagtttatgagttgtttgtgattttatttgaaagtttagggtcgggtttagtggtttatgtatgtaattttagtattttggaaggttgaggtaggtgtattatttgaggttaggagttttagattagtttggtttatttggtgaaattcggtttttattaaaaatatagaaattagttgggtgttgtggcgggtatttgtaattttagttatttgggaggttgaggtaggagaatcgattgaatttgggaggtggaggttgtaatgaggcgagatagtatattgtattttagtttgggtgacggagtaagattttgttttaaaaaaaataaaaataaaaataaaaataaaaataaagtttaattggggaaggttttgtttttaagtttatttatatagttgtttgtaggatttagtttttaaagggttttttgattgagggttttagttttttgttggttagtgtttggagattatatttagttttttgttatgtgggtttttttaatatggtattttatattattaaagttagtaatagagaggttagtaagtagaaagttttgtttttttttttttttttttttgtgatggagttttgttttgatttttagggtggagtatattggtataatttcggtttattgtgatttttgtttttcggttttacgtaatttttttgttttagttttttgtgtagttagttgggattataggtatgtgttattatgtttggttaattttttggagttttagtagagatggggttttattacgttggttaggttggttttaaatttttgattttgtgatttgtttgtttcggtattttaaagtgttgggattataggtatgagttattgtgtttagtttataaataatgtttaaatttttcggatgtgttggtatatatttgtagtcgtagttatttagaatgttgaggtgggaggattgtttgagtcgaggaatttgaggttgtagtgagttatgattttgttattgtattttagtttgggcgatagagtaagaatttgtttaaaaaaaaaaagaaaagaaaagaaaaaaaagaaagaaatgaaagatttttttaaaattgttaaatttatgagagataaggaaagattgagaattttttagattgaaggagattatagatagatatgtgatagttaaatgtagtatgtgattttggattagaaaggatagataggttaagtatggtggtacgtatttgtagttttagtattttggaaggtttaggtgggaggattatttgagtttaggagtttgaggttgtagtgagtttttgatagtattattgtattttggtttgggtaatagagtgagattttattttaaaaaaaaaaaaaaagaaaaagaaaaaaatagttgttaaaagaaaagataattgtattttgggaggtttaggcgggtggattgtttgagtttaggagtttaagattagtttgaataatatggcgaaatttcgtttttgttaaaatataaaaaattagttggttgtggcggcgtgtgtttatagttttagttatttgggaggttgaggtaggagaattgtttgaattcggaaggtggaggttgtagtgtatcgagatcgtattattgtattttagtttgggtgatagatttgtttttaaaaaaaaaaaaaaaaaaaagataatttaaaaaagaagaggcggttattattgggatagttggtgaaatttgaatgggatttatgaattgaagagtgatattgattttttgattagaatggtgttttagtttgttagggttgttataataaagtattataaattgggagatttaaatagtagaaatgtattgttttatagttttggaggttggaagtttgagattaaggtgtaggtagggttggttttttttgaggggtgtaagggagaatttgttttaggtttttttattagttttcggtggtttgttggtagttttttgtgtgtgtgtgtgtgtgtgtgtgtgtgtgttttgagacggaattttgttttgttatttaggttggagtgtaatggtaagatttcggtttagtgtaatttttgttttttaggtttaagtaatttttttgttttagtttttcgattgagtagttgggattataggtatttacgattacgttcggttaatattttgtattttttttttttttttttttttgaaatagagtttcgttttgtcgtttaggttggagtgtagtgatacgattttagtttattgtaattttcgtttttaggtttaagtaatttttttgtttttagaatagttggaattataggtgtttatgattatgttttgttaatttttgtatttttagtagaggtagggttttattatgttgattaggttggttttgaatttttgatttcgtgatttgttcgttttagttttttaaagtgttgggattataggcgtgagttattgtgttcggttaattttttgtatttttagtagagatgggattttattatgttggttaggttggtttcgaatttttgattttaggtgatttatttgtgttggttttttaaagtgttgggattataggtataagttatggtgtttggtttgttggtaatttttgatatattaatttgatttttgtttttatggttatatgttattttttttattcgtaagtttatgtttaaatttttttttttataaagggggtgagaggtttatttaattttagtatgattttattgaattaattatatatgtaataattttatttttaaataaggttatattttgaggaattgggagttaggattttattatataaattttatttttttttttcgatttttattttaagtttaggggtatatgtgtgcgatgtgtaggtttgttatataggtaaacgtgtgtaatggtgatttgttgtatagattattttattatttaggtattaagtttagtatttattagttattttttttggtgttttttttttttttatttttttagataggatttagttgtgttgttttttatcgtgtgttcgtgtatttttattattatttgtaagtgagaatatgcgaataaatgaattttttatttttttttttttttttttttttttgagaggagtttcgtattgttagtggggttggagtgtaatggtgagattatagtttattgtaatttcggttttttgggtttaagtgatttttttgttttagttttttatgttattagttggaattataggggtttgttattatgtttagttaatttttgtatttttagtagatatgggtttttgttatgttggttaggttagttttaaatttttgattttgtgatttgtttattttggttttttaaagttttgggattataggtataagttatcgcgtttggtttgattttgtttttttttttttttttttttggtaataatttattttgttgttagattggagtgtagtggtgcgattttagttttttataattttcgtttttcgggtttaagttatttttttgttttagttttttgagtagttaggattataggcgtttattattatattcggttagttttttgtatttttagtagagatgggtttttagtgtgttaattaggatggtttcgattttttgaatttgtgatttgttcgtttcggttttttaaagtgttgggattataggtatgagatattgcgtttagtttagtttttatttatttttatggttgtataatatatgaatttttaggagatataatttaatttgtaatatatggttatattggggttgagagcgagatggaataaatatagttaagtgttgataaatggaaaatttgagtgaaagaggtatatgttaaagtttttggaattgtttttaaatttttttgtaagttgaaaattattttaaaattaaaaaaattttaataagatgttaggtttatttattatataagatgttggtgttgaatttattatgtaaagagataataaaggtgtttgtgtggttttattgtatatttgtttgggatgtaagtgagggtattagattaatatgttatatttatatagtgttttataatttataaaaaattaataatattaaaaaatttttattttatttattttttagaataattttgggaggtaagagttttttttgattttattataaaataaaatattaaagaaaggttatgtgatttgtttatagttttatataattaagtgattagtttaaattttagtttagggtttttttattttttcgagatttttttgtagttgtagtaaaagataatgcggtatgatttgaaataatattttttttttgagatagagtttcgttttgtcgtttaggttggagtgtagtggagtaatttcggtttattgtaagtttcgtttttggggtttatgttatttttttgttttagtttttcgagtagttaggattataggttttcgttattatagtcggttaattttttgtattttttttttttttttgagacggagttttattgtatcgtttaatttggagtgtagtggtatgattttggtttattgtaaattttgtttttcgggtttaagtgatttttttgttttagttttttaagtggttgggattataggtattcgttattatatttggttaattttttgtatttttagtagagacggggttttatcgtgttagttaggatggtttcgattttttgatttcgtgatttgttcgtttcggttttttaaagtgttgggattataggcgtgagttatcgcgtttggtttaattttttgtatttttagtagagacggggttttatcgtgtttgttaggatggttttaattttttgattttgtgattcgtttatttcggttttttaaagtgttgggattataggcgtgagttatcgcgtttagtttttaaaataatattataatattatttttgtttttttggggggtgatttgattttttaagtaaagaaggtatttttaggtatggtggtttatgtttgtaattttagaatgatgggaggttgaggtggaaggattgtttaataagtttaggagttaaaaattagtttgggtaatatagaaagattttgtttttataaaatttaaaaatgagttaggcgtggtgatatatatttgtggttttaattatttaggaggttaagatgggaggattgtttgagttggggagattaaggttgtagtgggttacgtttgagttattatattttagtttgggtgatagagtaagattttgtagttcgggtgcggtggtttatgtttgtaattttagtattttgggaggttgaggtgggtggattacgaggttaggagttcgagattagtttggtttatattgtgaaatttcgtttttattaaaggtataaaaaattagttaggcgtggtggtacgtatttgtaattttagcgatttgggaggttgaggtaggagaatggtttgaattcgggaggcggaggttgtagtgagtcgagatcgtgttattgtattttagttcgggggatagggcgagattttattttaaaaaaaaaaaagattcggttaaaaaaaaaaaaaaaaggaataagatttttttattgaggtgaaaatgaaaatgaaatagtttaggtaggaggttttaaaggtttttagtataaggtttattattatatatattgttttttttatcgttttttttttttttttttagttttatttgggcgaattttttgtttttagatgggttttaattttattatttaatttttaggttaatgtttggggaatagggttaataaaatattttttttttttatttttatttttttgagacggagttttattttgttatttaggttggagtgtagttgtagtggtatgattttagtttatggtaattttcgttttttagttttaagagatttttttgtattagtttttcgagtagttgggattataggtatgcgttattattttcggataatttttgtattttaggtagaaatagtgttttattatgttggttaggttggttttgattttttgattttaattgatttattcgtttcgggtttttaaagtgttggaattataggcgtgagttattacgtttggtttaagaaaaggtttttaattagttaaaaaaaaaaaaaagaaagaaagaaaagaaaaggtttttagtttttgtttttataatttttttaattatattttttattggtagtttttgagatttggattatcgatggtaaaattttatttttttttaaaattattttggttgggtgtagtggtttatatttgtaattttagtattttgggaggttaaggtgggtggattatttgaggttaggagttttagattagtttgattaatatggtgaaatttcgtttttattaaaaatataaaaaaattagtcggatatggtggtatatgtttgtagttttagttatttgggaggttgaggaaggagaattttttgaatttaggagatagaggttgtagtgagtcgaaatcgtgttattgtattttagtttgggagatagagcgagatttcgtttgtaaataaataagtaaagtaaagtaaaataattttaatttaatagttaagttttaattatatatttttgttttgttgatttattacggtttttgtttttttataagtttttttttgggtttatgtagttaatgataatttttttttggtattgtagagattaaaagttaggaagagagtgttttgggttatattattttaaatttagttgtttgtagatttagtggggagaattatttttgtgagaatttaagttttttttgtttgtttttattcgttttggttaggatagattattttattttttattatttagttagaaggggttttagatttttgattgattatggtttatagatgtatggtaggtttatttttttattttttattagttggggtttaagattttgagttttgagtttttgagatttgagatttagagtgataggtagttttagtttatgtttttatgttgggtttttagtttttaaattatagaattatattatgaaaaagttgaatagagtttatggattatttagtttagattttttatattatattggatgtttaaataattgatttgaaggtttatagggttttttttttttttttttaggtgtgggaattaaggttaggattggtaggtgtaggatttgttatagttatgttttttaattttggtagtgttgagtaaggttttgtattttagttttttgatttagttagttgtttgattgtgagttaggatggtagaggaaggtgatgtggacgaggcggatgtgtttttggtatttgtttagggtttttttttttttaggggtttcgtgcgacgtgttttggataaggttttttttatttttttggttttttttttgatattgttgatgttggaggttgtttataagttgttgtggttattattatgggtaaagttaggggattggtttttggggatattttagaaggaggaggagttggaattgtgattattttttttataaatattttttttttttattaaggaggtgagaggggagataggagggaaatgggagtgttgggggttatggaggagatgtttggatagtttagggtagtagtttttttttttttttttttttttttgagatggagttttgtttttgttatttaggttggagtgtaatggtataattttggtttattgtaatttttgtttttagggtttaagggatttttttgttttagttttttgagtagttgggattataggtatgcgttatcgttttttgttaattttgtatttttagtagagataaggtttttttatgttagttaggtaggtttttaatttcgattttaggtatttgtttgttttggttttttaaagcgttgggattataggtgtgagttattgcgttcggttagggtagtagttttaaattttgtatttatatttagggaaataattttgaagaagtatatatttttttatatatttttaagtaggtatttaaaaatttttattataaattaaaattgtggtcgggtatagtggtttatgtttgtaattttagaaatttgggaggttaaggtagggggattatttaaagttaggagtttaagattagtttggtaaatatggtgaaattttatgtttattaaaaatataaaaattagtcgggaaagttggtgggtatttgattttttgttttagttatttagaggttgaggtaggagaattgtttgaattcgggaggtagttgtagtgagtcgagatcgtattattgtatttcggtttgggtgatagagcgagattttttttaaaaataaataaataaataaataaaaataaaaataaataaataaaaattgttttaaggatgtaattttggtatattgaaaatatttatattttatttattttttaatttttattttttttttgagatggagttttgttttgtcgtttaggttgtagtgtagtggtgtaatttcggtttattgtaatttttgtttttggggtttaagtaatttttttgttatagttttttgagtagttgggattataggtgtgtattagtatttttaatttttatatttttagtagagatggggattttattatgttggttacgttggttttgaatttttttttttttttttttttttgtgatagagttttttgttgtttaggttggagtgtagtggtagtgatttttgtttattgtagtttgtttttattttttagattttagcgatttttttgttttaggtttttaaatagttgggattataggtgtgtgttatcgtgtttagttaatttttgtatttttagtagagataaggttttattatgttggtaaggttggtttggaatttttgattttaagtgattcgtttattttagttttttaaagtgttgggattataggtatgagttattgcgtttagtttatttattgatttattgagatgaggttttattatgttgtttaggttggtttgtaattttgagattaagtaatttatttattttaattttttaaagtgttaggattataggcggtgagttatagttggttatattttattttatttatttattttttgagatagagttttgttttgttatttaggttggagtgtagtggtattattttggtttattgaaattttcgttttttgggtttaagcgatttttttgttttagttttttaagtagttgggattaaaggcgcgagttattacgtttagttaatttttgtatttttagtagagacgggggtgttattatattggttaggttggtttcgaatttttagatttcgtgatttgtttgtttcggttttttaaagtgttggaattatagtatgagttattgtatttggtttatttatttatttttttgagatatagtttttttgtgttgtttatgttggagtgtagtggtgcgattttggttttcggtaatttttgtttttcgggtttaagcgatttttttgttttagttttttaaatagttgggattataggcgttcgttattatatttagttaatttttttgtaattttagtagagacggggttttattatgttgggtaggttggtttcgaatttttgattttaggtgatttgtttgtttcggttttttaaagtgttgggattataggtttgagttattacgttcggtttatttttttattttttgagatagagttttgttttatcgtttaggttggagtgtagtggcgtgattttggtttattgtaatttttgttttttaaatttaagggatttttttgttttagtttttaaatagttgggattataggcgtttacgattacgtttggttattttttgtatttttagtagagacgaggtttttttatgttggttaggttggtttcgaatttttgattttaagtgatttgttcgtttcggttttttaaagtggtaggattataggtatgagttattatgtttggttttatattttaaaataaaataattagattattatttattgtttagtggaattgaaatattatagtgatggtcgggtacggtgttttacgtttgtaattttagtattttgggaggttgagttgggtggattacgaggttaggagtttgagattagtttggttaatatgttaaaaatttatatttattaaaaaaaaaaaatataaaaaatataaaaaattagttgggtatggtgttgtgtgtttgtaattttagttgtttaggaggttgaggtaggagaatcgtttaaattcgggagtgggaggttgtagtaagtagagattgtgttattgaattttagtttgggcgatagagtaagattttattttaaaaaaaaaaaaaaagtataaattagtttttattagttgggaattatttttttttttttttattattttttttttttttgagtttttattattattttatttttttataaattttatgtttttatatttgaaagttttttattgattaattttttatatttttttgtatatatatgtatattaattgagatgaaaaatattttttttgtgattgtaagattttagttgttaaaaattattttggaggagttattgttataattattataagaatagaatgtttttataaatatgtgatcgtatatttttttttttttttttaagacggagtttcgttttgtcgtttaggttggagggtagtggcgcgatttcggtttattgtaagtttcgtttttcgggtttacgttatttttttgttttagttttcggagtagttgggtttataaggcgtttattattacgtttagttaatttttttttttttttttttttggtatttttagtagagatagggttttatcgtgttagttagggtggtttcgattttttgttttcgtgatttttttgtttcggttttttaaagtgttgggattataggcgtgagttatcgtgtttggtcgatcgtaaatatttttataattgttaaaaagaaatatttaataagatagtagtttgggagtggcggtttacgtttataattttagtattttgagacgttgaggtgggaagattgtttgaggtaaggagtttaagatttatttgggtaatatagtaagattttgtcgttataaaaaatttttttttttttttttttgagatagagttttgttttgtcgttaggttggagtgtagtggttgattttagtttattgcgattttcgtttttcgggtttaagcgatttttttgttttagtttttcgagtagttgggattataggcgcgtgttattaagtttagataatttttgtgtttttagtagagacggggttttattatgttggttaggttggttttaaattttcgattttaggtgattcgttcgtttcggttttttaaagttttgggattataggtatgagttatcgcgtttagtttttataaaaaattttttttaaaaaaattagttaggtgaggtggtgtgcgtttgtagttttagttatttgaggtgggaggatggtttgagtttaggaatttgaggttatagtgagttatgatcgtattatcgtattttagtttgggtgatagaataagatttttttttttttttttttttttttttttttttttttttttttgagataatttcgttttgtcgtttaggttggagtgtaatgacgcgatttcggtttattgtaattttcgtttttcggattcgagcggtttttttgttttagttttttgagtagttggagttataggcgtttgttattacgtttagttaatttttttgtatttttagtagagacggggttttattatgttggttaggatggtttcgattttttgattttatgatacgtttatttcggatttttaaagtgttgggattataggcgtgaattatcgcgttcggtcgattttgtatttaaaaaaaaaaaagataaaagaaaggaaaaaaaaaaaaaaaaaaaagaaaaggtggtatttatggtgttttggtgaaagaaatagggtatatttttttttattttaaataggtaagattatttttaggagattttatggttgagaattatatttttgaggggggaggggaaaaaagagaattattttttttttttttttttttaagagggtgattttattgtaaaaggagaagtgaagaatgagaatttgtattgtaggtgtttttttaggaagattaattttgggaaagttgaggtttttgaaattaaattttttatattttttaagttttagttttcgcggagagtttttatgttttttattttgaaagttgtagattttgacgattggagagaagtgatgtgggattgtttaacggacgggtgtttgcgattttaggatttagcgttagggatttaataagttttgtgattttagttaagtggtaagatgtttattatttgtggaaatgggaattttagcgattgggattttgttaatttttttggtttttttataagtttatttttggatttagttttgtttttacgagtttttttagtttttttaaatataacgaggtgggtattaaatttgtttttttattttttatttttttttttttttttttcgaagaggaggaggaggagatttaaagtattttatgagttttatttcgttttatagtagttttcgtagcggtaatttgtataaatttttttttaagttttattttattatcgtttattcgtagattttaggttttttacgataaagtacggttatttggttagtatagacggtttttcgaggattttttttggagaagaattatttaggttttaacggtttggttggttattagttttgtggtgaagtttgaaaagtaaattagtaataatagtaataataataatatttttatggcgcgttgtgtttatttgtacgtatgtgttataacgatcgcgggacgtagtatttggtagtagaaatagttgttggatagcggtaaggagcgcgtcgtttttgtaggggaaggggttgggttagtcgaataagtcgtggaaatgggaatttgggggataggaaagtagggttagatagtttgttaatagtttaattgaaagaaaaggttttattttttttttaagagatttttgtttttttttgaaattttgtatagttttggaaagtttaatttttaatttattttgttcggtttttttgtttttttttggaaacgaggttcggttttttttacgcgttatttttcggcggttgggttttaggtaggaagtttttgattggcggagtcgtagaagtatcgggtgaaaagagttttattggttgcgtatcggagttcgggcgtagttagtgtcgtacggtaaaatggcggtttttagttgttttgggacgtttgggttcggggagataaatttcgatttggaagagatcgttgattatgtgggtcgtattggaggtgttcgcggggcgggtttattgttattttcggttataggaagtttgtgtttcgtacgataatatggcggcgtttagttgtatgaaggcggaaattttgtgattttcggttcgtagtggggtttgcggtgggagtgggaaggaaggcggagggaattatgcgaggttttgagaattgcggcgagggtcgtttcgagagacggtttttgaggtgggggtcggacggtgcggggattagaggcgggggcggggatatagagggagaggtattggggagagttgggcgttgagtttgaggggaaagttgtggtatttttttgtttttgaaagggagtggagcggtcgggggttgaattgggggagggggatttggcgggaagcgtatttagcggatcggtcggatttacggttgggatttaagaggaatcgcgagagcgtagcgcggtgcggggggatttttgattagttacgggttatcgagagaatggggaaaattagggtggggtgaaagggaggggatttgggtaaaatatttttaatttaaagttttagtttgaggagatttatcggagggtgaaatatggagataatttaaggaggagaaaagagaacggattgttgggagggaattttttttattttagagagtttaggagttggggtgattatttaggatagggtgggtgtggggttgatttgtttgagagtagagggggtaaatatatgaggtggcgtttataggagtgtgttgtttgtgtaagggggtgttaggacgatttggggtgtagtgtgggaggaagaattaatttgttaattttaagaaataggggggaaatgtaatagaaagatcggaaatcgacgtgaggggtggagtagaaggtggtaatttaaggtgtgggggtggtttgttttttttttatattatttgaagggttttaaaaagtatatagaattaatggttattgaaattaggtggtgaagatagtgttggttagggttggatgttattgaaatttaaggagtttagaaaatgtgtgaggtgaagggatggggttatgttggaggggtttattttgaggttttatttttttttagtaggaattttgaaatttttattatttttttttttcgggggatttgattttttatggttatcgttaatagtattatcgtgttggatgatgatgacgaagatgaagtagttgtttagttagggtttttttatttattttttaatgcggttttatttggggtagaagtttttagtttttttgagttttatggggttagaggaagtagtagttcgggcggtaagaaatgttataagttggagaatgagaagttgttcgaagaggtgagttttagcggggaagattgttgtattttagggagggggatggttgattggtttttttgtttttttttttttattaattttatttttttttttttttaatttttttttttgttttttttttttttttttttttttttgaattttttagttttttgaattttgtaagatgtagatagtagattattttgaggtggttttatttttttataatcggtagtaacgtgtttattttttgtttttggtttcggcggagttttgtaatattttttttagggttttgtttcgggttcggagtcggttagttaagttttatgtttatattaatgagttttgtattgtttttaaggtttatttagttaaaaagaagttgaatttggtttttgtcgttattatttttaatgagttttttgggaataatttttttatatatttttttttggattttataaatgttgaaaatattgttttttagtttttaaggattcgtggttttcggcggtagatttagcgtttggagtagttgttggcgttttatgtggtagagattcggcggttgtaggaaaaggagttggattttttagaattggatgatttagatttcgtatatttgtaggaggtacggttgaagcgtaagttgattcgtttttttgggcgattatgtgagttgaaagattgttttttattgatcggtcgtgttatagagtagcgtattttttatcgtggtattcgttatttagaggttaataggcgtattgagcggtttattaataagttagggtttgatattttttttgattatggggatgtgtttcgggttgtagagaaggtagttgttcgatatagttttggtttttttcgatagtagttttagtttatggtttaggatgtttttcgagatgtgggtattaggttataggagcgacgttatttcgattttatttataattttggttgttattttatagatgattataggttaggtagggggttggtgggatgttttttagtgatttttatatgttaggtatgaggcggatggggtatttttttagttttttttagggtttttatttttttagtttttttaagggttgagtgttttgattttatgtttttttacgtaggcgttgattttgtattattagattttgtgttggttcggcgttttcgggaaaatcggagtttggttatgagtcggttggatgaggttatttttaaatatgtaatgttgtaagataaaagtgaggagggcgagagaaaaaagagaagagttcggttttaaggtatttttttttattttgtagatattttcgaagtttttttggattttggtgaggtgtggatggggtatagtttttagagagatattgttttttttttgtattggttattagggagtttaggttgattgatgggggagtatgagaaggaaagtaagaattaaattttttggggtaagggattttttagagaaatttttttgttttttagggttttagtggaatggtattttaggggtgtttttttgtttttagagttgagatagatgacgaagacgatgaggagagtgatgaggaagaggaggaggaggaggaagaagaagaggaggaggttatagattttgaagaggaggaggatttggaatagatgtaggagggttaggaggatgatgaagaggaggacgaagaggaagaagtagtagtaggtatgttaagggaatattttttttatttgttatttttgttttgttaggtatgagttatttgtttgaaatttttttttttttttttttagtgtttttttagtagtatttttttttttttatttttaggttattttttttttttttttttttttttaggtaaagatggagataagagttttatgtttttattatagatttttaatgaaaagaatttggaatttggtaaatagattagtagatttttaggggagtagtaaaataaaggacgtatagtgttattatcgttattgttagaagaatttttggttttttttagtatagatgttgaaagtaatggagaatagtttgaggagttgattttggaggaagaaagttttgtgttttagttttttgagttagagattgaagttttgtttttggatatttttttttttgtggagacggatatttttttttttaggaagtaattagaggagttttttattattgttttagagaatggagtaggtatggttttttttattttttttaatggaggcgtttttttttataattggggagattttggttttttttgtaaaaaatttcggaaggagaagaagtaaataggattagggttattaggaaataggtaataataagaggaggaggaagagggaagttaaggagggattgtaggggattttcggagagtaatattggggaattgagtttgttgggagagattggattgtttttttttagttttagttttttcgtatttttttatatatttatgtttttgtttttagttatgtggaaaggtaaaggttagtgtatgagaagaatgggaaaaagatatgtattttgtttagtttatttttttttttggtttttttggttttagttgttgatttttttacgagggtggatttttttagttatggtttggtgattagttttttttgtattttttttttagttcggttgttttaaattttttatttatagttttttcggtttggtatttgtaaggtaagaaggggagggcgtgttttttttgataatttgtttttttttattggttgttttagttgttttgtttgaatattttacgtgttatattttgttttttttttttttttatttattttattttttaaatttttttgtttttttttttttgtattttagatttttttgattttttgttttttatttttttgtagataagtgtggttatataatgcgatttagaagagattatcgtgtttttagattttgattagttgtttttttttttttttgtttttagaatgttttgggataatatttggaggaaggtgggaagtagatgattgaggaagggatggattaagttaatttttttttggtggtgtttttttaaaaaaaaaaaaaagtttaagttttatatagaaatattaataaataataaagttttttttttattgtattattgttttttttttgtttttttattgttatagattggtattagttgtttttttgtttagggttagtttagtattttcggggtagtttcgttttgttttttttagtttggtttttttttttttttttttttttttgtttcgttgtgtcgtttaggttagggtgtagtggtgagattatagtttattgtagtttggattttttagttttaagcgataatgttttagtttttcgagtagtcgggattataggcgcgtgttattatgtttggttaatttttgtttttgttgtttgtattttttgtagagacggggtttcgttacgttgtttaggtagtatttttttttttttttaagtgttttagtcgttttaacgtattttatttttttatttcgtgtagtaggagtgagaaagttaatgaggggtcgatttaaggttatttagttaatttaggttcggagaaagggggcggggttttagtgggattgtaaggagttaggaagagggcgattagattttattaattagttaatggttatagtttagaggcggagtttggggaacgatatttggatttatcgttaatgggaaaaggtaggtttatagttttaaaggggaataaatgtttcggtcgaattaagttttgagtttttagcggaggaggggatttgattttttaaggtggaatgtggcgatgtttttttaaaggtaaagtggtcgagtcggtcgagtattgtttagcggtacgggcggggtgttcggttgtgtttttaaaggcggaggggcgggaggcggagcggaggcggagggcggagggagtcggcgtaagatggcggcgggaggggtttaggttgttgttttggtcgtcgagtgaggggcggggggggttcgggggcgcgcggttcggtaagcggggacgcgcgaggttggggggcgtttttcgggtgggagaagaggtcgaggtagcgtttggggcggagcgggggggggcggggttcgttgtgggcggaggtagataaggggcggggtcgaaaggttcgatagtgggcggggtacggggggggtgggtttggaaaggggcggggttagagaagttggggcgaaagggggcgtggtcggcgagagagtttggggggtatagtttgaggggagatggagtaagcgttggtttttagtagtagagttgttttgtttttttttaaaaagtgggtgtaaaatattaaaaaggtagattttggaatgttaggtttttaggtaagtcggaaatagggtataatttcgaaggaagttattttagtttttaagagtattttatttttttaatttttaaggaaagggtataagatttgttagatatttgtgtttgttggcgttgttatttgttgtgtgattttggataattttttaatttttttgagttttagtttttttatttgttaaatggggttgagaggaatatttattttattgttgtggggagttatatagataatgagcgtgaatatatttttgagttgtaacgggttgtgtcgttatgagatgttattattatttttttttttttttttttttagagattttttcggtcgttttttttttttttttgtttttgtggttgggggggtattttttttttttataatatggagttattttttttgttttttagtggggtagtattttttttgtcgttgtcgttggtttcgtttttattatttttgttagtagttgtagtggtatatgtgtttttttttgaggtgattagtgtttttttggagttttttaattagtagcgtttgtagggttagttttgcgatgtatttattagagtgtagggtcgggagtttcgggtttatcgggttgttttggttgttttttttttttatttttatgattaggttttatttaaaggtatgatttttatttcgttgtttagtgttatggatttaggcgtttttgagattgttttagttttcgtttatattggtcgttttagtatggttgttgttgatattgttaatttttttatagtggggtttgtgttttaaatgtggtatattgtggataagtgtattgaattatttcgagaaggtcgggttttagttattattattattattattgttgtagttatttttgttattgtttttggtgttggggtgttattcgggagtgggggtattgtggtttttgttattatgggttttgcgcgtttttatgtttttagtcgggttagtgagaattaattttttagtagtagtaattattttagttttagggagtttattgattttttattttttttttaagaggtatttgtagtttttgtagtgggtagtggggagcgtcgaggaggtggttttgtatttttagtttttgtcgttggtagtggaggggttatatttggaaagttgttgttggaggtagatgagttgtgcgatgatggtggggatgggaggggggtagtggtttttggggttgggtttcggagatttatttatatattttttagtattatgttatagaaatattgggtatacgtgaagcgaggtggtaattgtttagcgttaatatttttggttttttaagatttagatttggaggaggaagaggaggaggaagatttggtgttgatttgtgaggatgatgaagatgaagaattagggggtagttttagggttttagtggggggagggtttgaggttatttttagtataagtgatgttcgtattttgagtgagtttttagataagggggaggagtaggttaatttttgtgagttttttaatgattttggtttatatgagggtgggggttttgtggtaggttttgatgatttaggggggttaattttttttttttatgtttttttttatttttttcgatcgtttttttttttggatatgtagggtaattagattttggttttttcgtcgtcgtttttatttttatttttataggtttttggttaattattagggaattaagtagaatacggggtagtgatcgtggggggtacgtcggtggggagtttgggtgtgtcgggtagcgttggtggggtttttggagggattggtagtggggacgggaataagatttttttgtgttattgtgggaaggtttttttttataagagtatgcgggatcggtacgtgaatatgtattttaatttgcggtcgtttgattgtttcgtgtgtaataaaaagtttaagatgaagtattatttgattgagtatatgaagacgtatataggttttaagttttacgagtgcggagtttgcgttaagaagtttatgtggcgagatagttttatgcgttatcgaggatattgtgagcgtcggtatcgtttgggcggggtcggggtcgtatttgggtttgggatttttacggggttatttttgtcgtttaagagagagtttttcggagtgggcgggggtagcggcgacgaagcgagtgcggttacgttttcgtttagtagacgtgtttggtttttatttagagtttataaggtggagatgggtttcggtggaggtggaggagtaaattgaaggggtaggttattggggtggggtagttttcgggaaagggaataaggagtacgatgtaagggcgttgtggttttcgggtgattttttattatatttattgtttttttttatttttgtggatttgtatatattttggaaggggaattatagttttattatcgttcgtttattttattatttaattttttttttttaaggtatttttagaattaaattttttttttttttttgatgggtatattgaagtttttgttttatagagtagattgtatatggagggagggagagggggcgtgttgaatattttgtagttatagggttaggggttaggtggttgtagtttgtgtttgaagtttgtgtttgtgttgtcgtggagataaggtttttgagttttatttttgttttagaatttatttttttttaaggatgcgttttttatttttattttgttttttttcgttattttcgatttttcgtggaaatttttaattcggtttttatggaggagtgggtggagataaggagggagtaagtcgtaggagtataaggtttttattttttttaatagtgattaaaatatttattggttatttatttggtttttcgataattcgtgtgtttgttggggacgcggtatagatagggggaagtcggagtaatggttttcgggtaagtggatgttggagagtatatataggagttggggggcgggggagggtttggggttggggagggttcgaattcggggttgttgggtagtttaggagggcgcggtaaggttggggtgttttggtgagaattggagaggatttattcgggtttttgtttggttagtggggaaatatcggttttttaggtatttttatttaattagagcggggatttttatcgttttttatgtcgttttttggaggaaagtgaaagtgaaaggaggaagaggaggttttatggttgaggaggtcgtagcgttatgaagtttttgtttttgtttttcgttgtggttttgggtgagcgaatttcgcgatttatcgtttaagaattagagggaagcggagggaggtggttttattggagtcgatgttagggtgggagtggggtaggttattagatatataaatcgttttttattcgcgtttttatacgttaggtttggcgatcgtcgttttagtaggattcgcggtgatcgagtgttggttcgtggaggatgcgagcggaaagggtttggttaagagattcggtgtattgttgttgcgttagggatcgggggaatcgtcgtttcggtcggatttcgattttgagttttattttagtgtatacggtgagtttttagggattcgtcgtttttttatttttgtcgtttttatcgaaatttttttttttttagattcggtagtgattttaggttttagttttttttttgtaaagtgagttttattacggggtagtttgtgtatttgaagtttttcgaacgttgtttttttagtttttttttcggcggtgattttatagttgtaatttttttttttatatttagatttcgcgggcgttttttaggttgtttttaggcggtattttcggggcgttttcgtattatattgcgagatgagtcgtttcgtgttttttttcgtttttgcgaaatgggttagcggtttgattttcgcgtagaattgttcgcgggttttggatggggtttggttgatggttagtatatttagtttagtttttagtttttttagttttttgcgattatagttagagttttagtaggagtttgtttttattattatggtaataggtagttggggaggggaggtggagaagggtgggtagattttaagggtttagattagtcggtggtttcgttttatggatttgagtaagatatttcgttaatcggggtttagttttttttttttgttaagagaggtggtttggttagaatgaattaatttttatcgttttttttagtttttatttagttaaaaaaaaaaaataaaaaaaaaattgtagtttggtagggggtagggggaaagtagggtcgggtaggggggttattttttggtgtttcgaagggcggggttttgaagaggtggggtttttcgatattagattttgagagatttgttaggtgatgcgaggtgggaggggtttagaagtaggagcgttttttttttgttttttttagatttgtgttttgttttgtatttttagttttgcgggttatttttttaaaatttagtattttatttttatttgcgtttatattcggcgttgcggtaattcgtaaagtaaaggtttttgtattttagcgcgttgattttgtttgatagtttcgtgtagggatgtgttgtcgttttgtggttcgtaaataggtgggttcgagtgggcggatggacgcggttggagattggatagtttttattgtattgaaaggtgtattgtagtttgaggtttaggagttagaagtttttttaggttgggacgtgggagggattgtgtagataatttaagaatgaggagagtttgatttggatatttgggagtttttttttttggtagcggaggcggggtatttcggggtagaatatcggtagagtttttagtttttttatttggattttatgttagcgatatagttcgatggatagggtaattttaattaatttttgtatttttttttttttttatttttttgagaattatttatagaattagggagatagatttgaaatttacgttgaaatttttatttttgtttatatttttatttttagttttaagtttttattttggtagaagttgaggaatattgtttttgtgtagatagtagttttttttggtggggtggaatattttttagggttattggttttatcgaggtgatgatgagaatggtttttgttttttgagtttgtttttttaattgtaaaatgtggatattattttttagttgttttttttgttgtgattattaagagatggtattgtgttaatttatttattgatttaataaatattttttagtattaagaatgagttaggatttagtagtttttagtttatattgttggaggtttttaaaatatattgaaatttgatttaattttatgtttagtttggtcgattaaattagaatttttggggtggttttgggtgtttttaagggttataaagatgatttgatgtagattttgttttttaggaggttttgggcgtatttgttacggataattttaatgtaaagtagaaagtgaaggatatgtagatagggagttttggaagtgttcgggtggtaagattgtttgtattttataaataattggggttaaagtaaggtgttgtgttatttatttatttttattttatttatttatttatttttgagatagagttttgtttttgttgtttaggttggagtgtaatggcgtgattttacgtttatcggaattttcgtttttttggtttaagtaatttttttgttttagtttttcgagtagttgggattataggtgtttgttattatatttagttaattttgtatttttagtagagatgaggtttttttatgttggtaaggttggtttcgaatttttaattttaggtgatttttttatttcgtttttcgaagtgttgggattataagcgtgagttattgcgtttgtttgttatttatttatttatttatttttgagacggagttttttttttattgtttaggttagagtgtagttgtagtggtatgattttggtttattgtaattttcgttttttatgtttaagtaatttttgtgttttagtttttttagtagttgggattataggtttgtgttattacgtttatttaatttttgtatttttattggagataggttttattatgttggttaggatggttttgaatttttgatttaaggtgatttatttattttggttttttaaagtgttgggattataggtatgagttattacgttcggtttgttgtgttttttttttttaagtatttttgtttgattagggatttaagaaaatgaaagttgttgtattgatgtaaaattagaaatgaaatttttttagggtttaagattatttatgattttgttaatatatatttatatttgttttattaaatatttttaaatgtttattgataaatatgtttatttatttatttatttgagatagggtttttttttgtcgtttaggttggagtgtagtgtaggttggagagtagtggtatgattttagtttattgtaatttttattttcgtggtttaagtgattttcgtgttttagttttttgagtagttgagattataggtatgtgttattatgtttagttaatttttgtattttttttgtggagatgggtttttgttaggttgtttaggttggttttggatttttgggtttaattgatttgtttattttggttttcgaaattgttgggattatacgtgtgagttgtttggttttaaatatattttttttttttttttttttttttgagatagagttttattttgttgtttaggttggagtgtaatggtgtgatttttgtttattttaatttttgttttttgagtttaagtaatttttttgttttagttttttaagtagttgagattataggcgtttattattaggtttagttaatttttgtatttttagtggagatagggtttggttatgttagttaggttggttttgaatttttgattttaggtgatttatttattttagttttttaaattgttgggattataggcgtgagttattacgttaggtttatatttttttaatatattttgtgtgtatagtgtttaatttttattatttttttaaaatattatggagttaggtgaggtgatttacgtttgtatttttagtattttgggaggtttaggtgggaggattatttgtatttaggagtttaagattagtttgggtaatataattagattttgtttttattaaaaattaaaaaaatgttgggcgtagtggtttatgtttgtaattttagtattttgggaggtcgaggtgggtagattatttgaggtcgaaagtttaagattagtttgattaatatggagaaatttcgtttgtattaaaaatataaaattagttaggtatggtggtgtatgtttgtaattttagttattcggaaggttgaggtaagagaattgtttgaatttgggaggcggaggttgtagtgagttaagattatgttattgtattttagtttgggtaataagcgtgaaattgttttaaaaaaaaaaaaaaaaaaaaaaggttgggtgtcgtggtatgtatttatggttttagttattcgggaggttgtgttgggaggattgtatttttgatgggtgatagagtgagattttgtttttaaaaaaaaaaaaaaaaaaaaaagagttaaattgtaaaatttttaggttttgtttattatttttttaaatttttttttttaaatagagatggggttttgttatgttgtttaggttggttttaaattgttgggtttaagtgatttttttattttagttttttaaggtattgggattataagtttgagttattttgtttagttaggttttgtttattaattttatggatttttttttttgagattaagttttgtttttgttgtttagtttggagggtaatggtatgatttcggtttattataattttcgttttttaggtttaagtgatttttttgttttagttttttaagtagttgtgattataggcgtgtgttattatgttcggataattttgtatttttagtagagacggggtttttttagtttggttttaaatttttaattttaggtgatttatcggtttcggttttttaaagtgttgggattataggcgtgagttattgtgtttagtttgtggattttttttttttttttaataatttaaaagtatgtttttggattttgataaattaagtgaaattgtatattgtttttattttattgaataattttatgaagatgagaatagtttaattttataggttttagaagttaggattaaaaagaatataaaaataattataagaagaaaaagattatttttatttgaaggatttagatatttttgggaagaaatagtagtgaaagtgatttttatgtatatggagtatttagattaggggtttttaattttttggtttttttgagttatattgggagaagaattgttttgggttatgtataaaatatacgaatattaacgatggttgataagttaaaaaaaaaaaatgtgaaaaaattttataatgttttaagaaagtttatgaatttgtgtcgggttgtattttaagtcgtttttggttgtatgtggtttttgggttggaggttggataagtttgatagatgtttgggagaaaatgggaaagataatgtaaattgaagggattttatgattaaagtaaagagatgattaatgatgattatttttattaggtataagaaaggggttttatgtggttggtttgtagggtgtaggagaagtttggaagggtgggttaggggttgaatgtttaaatattttgaaagttgggttttgttttgtaggtgagagcgaattattagaagtttttttggagggcgtgttattttaaaaagtttgtttttattatgtatatatttattttttgagacggagttttatttttgttatttatgttggagtgtaatggggtgattttggtttattgtaatttttgttttttgggtttaagtaatttttttgttttagttttttaagttgatgggattataggtatttataattacgtttcgttaatttttttttttttttttttttgtatttttagtagagatggggttttattatgttggttaggttgttttcgaatttttgattttaggtaatttattcgttttagttttttaaagtgttgggattatatgtgttagttattatgttcggaaaaagtttgttattttatttgatttttttaaaagataggtaaaggttagatttttggattagtgaggaaaatataggttaaatgatttttttaagttaattagtaagtttatgatagtgatgaaggtaatgaaaatagtaatagttaatatttattaagtattttttatatgttaggttttgttttaagtattttatatgtataattttatttattttttttaataattataggttgtaggttttaatattatttttgtattgtatatggataaatataggatataaattagttaaataatttgtttaaggatatatagtgtgtaagaagtagagttagaggttaggcgtggtggtttatgtttgtaattttagtattttgggagattaaagtaggcggattatttgaggtcgggagtttaagattagtttgggtaatatggtgaaattttatttttattaaaaatataaaaattagttgggtacggttgtggacgtttgtaattttagttatttaggaggttgaggtaggagatttatttgaatttgggaggtagaggttgtagtgagttaagattatattattatattttagtttaggtgacgagtaaaattttattttaaaaaaaaaaaaaaaaaaaaaaaaaagaagtagggttagaaattgaatttaggttatatagttttagtttatgtttttattagttgattttttaggtatttgggatttttattttatttatttatttagttttgagacggagttttattttgttgtttaggttggagtgtagtggtatgattttagtttacggtaatttttattttttaggtttaagtgatttttttgttttagttttttaagtagttaggattataggtgtttgtttttatatttggttaatttttgtatttttagtagagatagggttttgttatgttggttaggttggttttgaatttttgattttaggtaatttattcgttttaggttattaaagtgttgggattataggtgtgagttattacgtttggtcgtatttgggatttttttttttttttttttgaaacggggttttttttttattgtttaggttggagtgtaatggtataatttcggtttatcgtaatttttgtttttcgggtttaagtaattttattgtttcggtttttcgagtagttgggattataggtatgtgttattatattaggttaattttgtatttttagtagagacggggttttattatgttggttaggttggttttaaattttcgaatttaggtgatttattcgtttcgtttttttaaagtgttgggattataggtatgaattattgcgtttggtttatatttgggatttttaaataggtaggtgatgggattagatttgtagttattttgtttggttatagtgtgaagaaggagttgaaggagagattgagaatagggagattagataggagggttgttgtaattgtttaaacgtatattgatgagaatttaaattggaaatagatgtgagatttgttaggttttggtggggatagtatatagtatattatttttgataatttgtttgtttgttattggattataggtaatttgagagtagggattgtttgttttgtttattattttgttttttattaggatattttgaatatttttagtgtttaatagttgttgaatgaataaatgagtttgagtaattttaagggtttgtttttagtgtttggcgggtttggtgattatttattaaagatagggaagatgggtattggagtagggtggggaatgttgtagagatgttgttgatttggggtatgttaagttaggtgtaattatagtaaatacgtgtagatttattgtgttttagatagtgttgtaagtattttttatgggtaggtgtttttgttatttaaaattgggaattgaatagatttgagtagtaagaggtattaatgatttaattattataataattttatgaagtaggtattattattattattaatttttaattttagagattaggaagttgagttatggaaaaaggaagtggtttaaggttatataaataagttgtagaggggatttgaattcggttagttaggttttaggtatttagttattgtattgtattgttttagtagagtatagaggtttgtgtttaggtttaggttagagttggaattttttagagttagtaaatattttgtatagtattataagattgatagttatggtttaattattgttttcgtttgtaattaagaaaggtttggttttttaagggtggtgtttggagatagagtggtttaggttgtgttagaagtggtttcggattttgtagtttttcgagttagagtgtgttatgtgtttagagtaggttttaaaggttatatttttttattgtttttatttattatttttagatttttttgtttatttttagttatattaggtgttatttagtcgtagagtaaaaggagtttgtagggagggttaggaaatggtgagtattagaaaaggtgttttttgaggggtgggtaaattgtagtttagttttttttaataattgtatttttttattttttttttttttttttttttttttatgttttttttaattttttatttttttgttttttttagtggtattgattgtttttatttatatttttgtttttcgagtgagattgggataagatgttttgttggatttgagttttgtttatatgttttttattttcgaggtcgttttatttttggtttcgggtttttttttttttgggttagagtggcgacgttagtatttgggtaagggatatttgtttttggttgtaatttttgggttgaatggttagatgttagtagtttaagaaggggtcgtggtatttgttgtttgggatgatgatgagttatggggtttatggatcggaaatgggattttttggttgtttatagtttaatttttttaggagggtatttatttggttattatatatttgttatatttgtaaggataggttattttggagtttgttgtgtatagtgagttgggggatagaggtttttaggggtagagggtgggtattggattgtggggatcgtaatagggggagggatgatggataagagggtgtttgggtaagtaagtagagatagaaagaggtttttgggagttagaggggtaatgggaggttagaagttttttggaaatttgaggggttttgatatgggtatttttgtgacgtattaatggagagatagtgggttttttattttaggagaagaaatttaattttttttagttttgaggaagttagtaggtaaattgagggttttttagggaggatagtatggattgatttttttatgtttatttcgttttttttttttagaattttttaaagtgtttttgatgttagtaatttttgtacgggtcgttttaggggaggtattttcggaattgttttgttttgtgttttatttttatttttttgggggtttggaggtggagtgggaatttcggggtggtttagggggtcgtttttagaaggtcgaggggtagaggtggttttcggttttgcgttattatttcgatggttttgttagtttttttgggtatttgtagtcgtttttagttattattgagtagtatggggtacgttatgtttgtcgaatttattattttagtttgtttgtttcggggcgtagcgttgaggttattttggaggtagtaggtaagagttgggagttttgcggaatttgagttagtatttaggaagataggagtttatttttattttttttgtttgttaggttttttagggtttttttttgaggatagcgtaggtttttttttgtttgttttttttttgtttgggttttttaaggtattgggttgggttggtaagtgttagttttattttgattatgatttgaggttggtggattttttttatttatttttaagagtttgatatttatttttttgttttttatttttattattttagtattttatttttttttaatttttttttatagttgtttatttgtttatttgtaaggatttaaagaaggtatagtgttttatttttttgtattttttttttgttattttatttttttattttattttaaaatttatggagggaggttgttggtgtggtaggtagaatttaggtttggaatttatattgatttgggttaaaatttggtattatattttaattgtaggattttttgagtatgttatttaatttatatgtttttttgggtgtagggattttaaaaagttatttaggtagtgttgtttaatagaaagataatgtaagttatatatgtaaatttaaatattttagtatttatattaaaaaaataagtagaaataggtaaaattaatttaataatatattttatttaatttaataattttggttttttatttgaaatgtttgggttagaagtgtttttggatgttggatttttttagattttggaatatttgtatatatttaatatttttgggattagatttaaatttaaatatagaaattatttatgttttttatatattttatatatatggtttgaagatttttttttttttttttttttttgagatagagtttttgtcgtttaggttggggtgtaatggtgcgatttcggtttattgtaatttttattttttaggtttaagcgatttttttgttttagtttttcgagtagttgggattataggtatttattattacgtttggttaatttttgtatttttagtagagacggggttttattatgttggttaggttggtttcgaattttcgattttaggtgattcgttcgttgttttggttttttaaagcgttgggattataggtgtgaatcgttgtattcgattataatatttttaataatatatgtgatttattatatgagggtagttgtgggattttttatttgtggtattatgttggtattaaaaaaattttaggttttggaatattttagattttagagttttggatcggcgatgtttaatttgtatatttaaaatattattgtaatatgtaaataatataagaaattataggtcgggtgcgatggtttatgtttgtaatttttgtattttgggaggtcgaggcgggaggattatttgaggttaggagtttaagattagtttagttaatatgatgaaattttatttttattaaaaatataaaaaattagttagatgtgacggtatttgtaattttagttattcgggagattggggtaggagaatcgtttgaatttgggaggtagaggttgtatgagttgagattatattattgtattttagtttgggtgataaaaggaaaatttcgttttaataataaaaaaaaaagaaaaagaaattatagttttggttaggtgcgttggtttacgtttgtaattttagtattttgggaggttgaggagggcggattatttgaggttaggagtttaagattagtttggttaatatggtgaaatttcgtttttattaaaaatatagaaaaattagtcgggtatggtggtgtatatttgtaattttagttatttaggaggttgaggtaggagaattgtttgaatttgggaggtggaggttgtagtgagtcgagatcgtattattgtattttagtttgggtaatagagtgaggttttgttttaaaaaataaaataaaataaaataaaataaattagttgggtatggtggtatatagttatagttttagttatttggggagttgtggtagaaggatcgtttgaatttgggagggtgaggttgtaatgagttaaggttgttttattgtattttagtttgggtgataaagtgagattttgttttaaaaaaaaaaaaaaaaaaagaaagaaaagaaaataaattgtagttttttttttattttaagtatttaaatataggtgtttattttaaatagttagtatattttaattcggattagttatatattaaatgtttaatagtttaatgtgggtggtggttgttatattggatagcggagtttgagaggatttttaggaggattaaggaagatagtgtatttttttaagaagatgtaggagatatagtatttagtagtgtttggagggtagaaaatattagttttattttttttttattatttgtgtttatgatagtttatatgtttttaaattgattatgtatattttaattgttttttaatattttgaattttttattattttttttttttttagaaagtagagtgagggtatttattgttattttgtggaagttattattatttttggtttaagtttttgtagtagttttttaaaataatattttattatttgtttttaatttttttaatttttttttattgagtggttggaatgttttttttttttttttttatttatataagggataattttttttttttttttttttttgagacggagttttattttttcgtttaggttgtagtgtagtggtatgattttggtttattgtaattttcgttttttgggtttaagtaattttgtggttttagttttcggagtagttgggattataggtatatgttattatatttagtgaatttttgtatttttagtagagacggggttttattatgttggttaggttggttttgaatttttgattttaggtgatttgtttattttagttttttaaagtgttgggattataggcgtgagttattatattaggttcgagaaatgtttttttaaaaaatatatattttatggtatttatttttttggagttttaggatagtggtttttaaaattttttttttttaggattttttaaaaattattaaggattttaaaaagtttttgggtatgtgggttatagttattaatatttatggtattagaatttaaaagtgagaaaaatttaaaatacgagaatatataggtatatattttatttatcgtgggaattatggtgttaatatatattatgtagtttttgaaaaattttattgtatatttatagaatgaagaaggtaaaaaatttttttttttttttttttgagacggagtttcgttttgtcgtttaggttggagtgtagtggcgcgatttcggtttattgtaagtttcgtttttcgggtttacgttatttttttgttttagttttttaagtagttcggattataggcgttttttattatgtttggttaatattttgtattttttagtagagacggggttttatcgtgttagttaggatggtttcgattttttaatttggtgattcgttcgtttcggttttttaaagtattgggattattcgcgtgagttatcgcgttcggttgtaaataatttttttttttttttgagatagagtttcgttttgttgtttaggttggagtgtagtggtacgatttcggtttacggtacgtttcgtttttcgggtttacgttatttttttgttttagtttttcgagtagttgggattataggggttcgttattacgttcggttaattttttgtgtttttagtagagacggggttttatcgtgttagttaggatggtttcgattttttgattttgtgatttgttcgtttcggttttttaaagtgttgggattataggcgtgagttatcgcgttcggcggcgaaatacgatattgtattaatattttaattttgttataaaattttataaattttttgatatagttttagagatttgtagggtcgaggttatatttggagaattcgtattttagggttaaatttattttttttgttttggtttatttgttttttttatcgtttcgcgttggagttattgtttagttttttagttttagatggtgttcgttagatttttttttaatgtttattatatatagggttattttttttttttaatgaattaaacgtttttcgtttatttttaggttttagttttttgttttttttgtttggtttatttttgttttttttgggtcgtagacgaggtcggtttcgttatttttcgtagatcgtcgcgcgttttttttgtgcggtttattatagttgtatttaagtgatcgtgtgagtcgtcgttaaatgtttgttttttcgcggattatgggtttttcgaggatagggattggtttgtttgtttattgttgtaatttcgcgtcggtatagggatttaaggtttattggagggcgtttattaagtagttgttggatgttgacgaaggaagcggcggcgtagtttagggattttcgagttaggacggtcggttagatttacggggtaacgggtttaatcgtgtaggaataaagttgtattttagtgtttttaaacggtttttttattttaatttttttttaagtttaatgaatattttaattatttttggttttttttagtgattttgaatcgtttagagaacgtttcgtcgatatcgttcggggcgggcgttattattggcgtatgagatgcgtttaagtagagggtattttattagcgaggatatatcgagtcgacggggatttcggtttcggcgtcggaagtttttgagagtcgaatttggaatcggatgtggttgttttttgtttcgttttttgtcgagggggcgggaatcgagggtttttcggaaaattcggtcgggatttcggttagttatattcgtgggttgtggtagggagggtaatttcgtggggatggagtgatcggtttttttttcgtttgaaacgtttttcgcgggagttttagtcgtgttattgttggggaagggaatgttaaattttgtttttgtttttttttaggggttggagattggaatttttattttagtttattgcgggtcgacgtggtttttagaattttcgagtgtagaggcggaggatagtggagttggggattcgggcgtttgggttttggtttttgagcgtttagcgtttttttagttcgcggttttggtttttgtttttatttttttttttttttggtttttgttttcggagcgggcggacgcgggggggagcggaaagggcgggagggtttaggagttcggcgggggggtttaagggggtacggaaaagtcggggaggggattcggttcggggtcggagatcgacggtaatagcggtttaggatttacgttgtttttatttttttcgagtaggttagagtttgagtattttgcgcgttttcgtattcgtgattttttttttttttaatagtattaagggtttttttattttatttttttgttgtttttttttttaatttttttgtagaattttttttcggtttttttgatatttatttacgttttttttttgttcggttttttcgcgtttgtttgattttttatttttattttatttcgtttttttttaggcgtttttatggttcgatttcgttgatttttttattcggttatgttttcgcggtttttgcggttgtttttggatacgagttttttcgggggagtcgtattgagtagttttcgaagtcgggatttcgaagagggtgggggtttaggtggtttggtcgtgggcggggggtaggaggaagaggaggaggaagaagaagaggtgagacgcgggtggtgggaggtagggggcgtatgtatttttgaagtttttattttttttttgtttttgggtttttatatttttttttttttgttttagttattttcgcgtttttttgggtgtcggttcgtttttttgttgcggggagttttggcgttttcgtggttttttgttagtgtgatttaggatttgttcgtaggaatttgttttgtttttgtttggaatttttggttggttgttttgtttttgcgggtttttggttttttatttttgtttgtttgagtgtgtttatttttttgagtagtcgtgttttggtttttgtttttttttttgtttttgtttggcggggaggggtttgtttttatagtaattagtttttttgattttgggattggggagggaatttttagatttcgtgatttttttttttttttttttttttttttttcgttttttcgtttcgtttcggttttgggtagaggtcgggaagttacggttttgggatttggaggaaagattttagggtgggtagagagtggttatttgtttttattagggattaatggtggtggttaggagtaggatttcgggttttaggaggggttagaatttggatttggggtttcgaggttttaaatttttaggtttagattttaggtgagggtaggttgattggtagggttggtttttcgggatcggtcgggggaggggttggggttacgtgattttttgagtttatcgtttttaattttttattattttattttttttttttttttttgtattgggattggagttgttattttcgggggttttttagggttgagatagtggaggcgttattcgagggattagggtgaaaggggttttgaaaaagattaattttttgggttggtatagtttttggtcgggaggggcggggtatgcggtagtgtttggattgaggttttagttatttttagtcgttgtttttggtttgttgtttttcgttttttttttttgttttttgtattttgtttttttgtcgtgtgtgggtttagttttggggagaaggggttttgggggtttttaggattagaatttttgtattttatttacgtttttattgtagttttttcgattttatcggggttttgaggcggttggggtggggttgtttgggttttagtgggggagatttggggttattagtttttttaattttttttcgtattcgttggtattatgttttgttattataggtgaggggtatagagggaggagtagggtttggggtgaaggttgagggtaatggggggtggtgtggaattgtttgatttttttttttttgtttttttaggtttttgtgttcgtttgggatgaggaggaggatggtgtcgtgtttatcgttataagtcgttaatatcgattttttgattttttggtgagattatgattttagttttttatttttgattttttatttttagtttttttttttttggttgattttttggttagagtgttaggttggagttttggagttttggattttgttgtgtgatataggttaagatttttgttttttttgaatattagaaaaatgagtttggaatattttttgggtttgggattgtttttagaaatttaggtgtagagtgggagaaagggttagcgattatttttttgtgttttttaggtttttatgttttttttacgtttttttcgacggtttcgagttggtattttggaggttttggttagatatttattggatattcggatattagggattgatgtgagttttatgttagtttttttggttatttatcgggtttttatttttacgtttgttttgttagggtttatggttgataggttagagttataagggacgtagggtagtggagtatttgttcggattttttaaagtcgtaatattttattaaaatagttaaagttattgagggtttgggaaaaatggatagatagattttttttttttttttaggttggaagtttttgaattttattttatcgacgaattagagaggataatagagtgagtgatttttggtttttaattttatagttttttttgtttaggttgtagttttattttttatttttggttgattttttttttttagggtagttatttttgtattgttaatttggttggttttttattttgaggattttggttttgaggttaagggttagtttgatcggtttgagagttttttattttagatagggtatgtagtagggaagggtgttggggggggtagcgttgattttattcgtaattttcggtttcgggtggatttttaggttttcgatttttttaagtttttggtttttttcggcgatttttttgttgattttacggatgttttggtgtttttcgttgattatttggtcgaatagttgattttgttagatgcggtgagattttgatttttggtttttatgttttttgattttttattaatttttttttgattttagattttttttttgtttttatttttttttgatttagtttttagttttttttatttattattttgattttttttttttttttttggtcgttattttttaaattttgtgtttttttggttttttggttatttgagatttttagatttttgatattggaaggttgattttatttgattatgaattttaatttttgatttttattttgtaggaatttttttttaatttgatttttttttagtgtttgggaggtttgtggggttatagagatcggttaggatatttttatttttgtttatttgttcgagttattgttatatagtttaataaggtggtaggggtagtggttagttttgttttgggggttatttttattggagagggatttggggaggtgattatacggttatttcgttttttatagagggttcggtttttggagaagtggattcgcgtggtagaggtgagagagaagattgttttacggtttgtggttatggaatggagaggttttttatagttttagtttttttttttgatttttataggagtgtcggttgtttcgaaatttttttttagtttatgtcgtggtgttagttttgtagtttagttttatttataggtttcgggtagtttggggggaagtaattaggtgcggaggttgaggtattggattggggtgggggttttttagaaggcggggaagagggggtgatagagttaggtttgtttttagggttattttttttttttttttagggatagttttagagttttttttagtttttgttagatttttttcgaggaggataattatttttagagtcgggagttgttcgtgtaggtgagagtttggtttgtggtatttttatttttttttgttttttattgtttttttatgttttttttattttgttattattaggaggtgaagttgtagttttttttggagttatattttaagaaggtttcgaggtttggttttcggggtggggtgagtgattagcggggtggtgggcgtgggggtggtgattatgaaggggtgaggagtatgttttgggggagtagtttgaaggatgggtaagggaggtatagaggggtgaggagaatgaaatttgttttttgaggtaatgaggagggtaagtgcggagggatggagggtttttacgttaatggtaggtatttttgattttgatttttgattttagggtgtggttttatattttggtatttttttgaaggattttgtgatgttggatgtagtttttaaggatgagttggaggttagtggtgtgtgtgtgtgttattgtaatgatgtaataagtgggttgtagggtcggatagattttttcgttttttgtaaggggttgtaaggtataaatagttgagtgtgggatagagttagatttgtttttgtgttaagtcgttttagtgatttgtaaatgggaaattagaaatagtatttatattgatttgttataagggttaaatgaatttgtatttgttaagtgtttagaacgtgtttgaaacgtaagtatatttaggttttgtgatgggtttttgttttattgttagagtttgttaaataaataaatattgagattttggataagttttttattttttttggataaggaattttgtcgaattggatattatttagtttttttatttgtaaagtagattcgttgtttatttgagaaatttaatttaaagggttaagtggagtgtttaggttatgatagattgaggaggaaggtagggagggatcgaagagttagagaggttggagggaagtggttgtgagttggatgtggttgtgtgtgtttaagagaggggatattttttttttgtggtcggaaggtagggttggaatttttattttatttttatttttttcgtagaatggatatattaattttgataagcggaggaaggtgagcggagtgtttgggttggatgttggatttttttatttatgttttaggaaggggagggggaaaagttaggggtttttgagttttggtttttgtagtttgagggtttttttttaggagtttgtagttttttttgagttgcgacggttttagaatgaatgtcgtggttataatttttaatttgattatgatatttagaggtggttataggggtttcggttattgatagaggtttagaggtgattggcgggtgaggttgggattttagggttttggttaggtgtgggggattggtgttatgttttgagttttgtttattgtttttttaatttagttatcgtgtattttgtgaggtggagttatttggttttagtgatttttttgttttacgggtgtttcggttaatattggttatttcgtagtggatagagtgagagatttattggttggggggtggttttttgggatttttatttttttttgatttttttaattttttgttattgtagggttttgggttttgttggggtttttatttcgtttgtgttttgtgatcggtttagtattgggggagatgaggcgtttataatttttgtttttttgttgattcggttggtttaggtgagttttgtttttgattttgattttgacgttgatttttattttgtaaatgttttttttttaaatttttttgtttttatgttagttttatgttgtttgtttttagtatatgaagtggttatttgtttcgttattagattttgttttggaaagtagtttatttttgtatagtttagttgattttagttatttttttttattagtttttttttttaggttttttcgaggttatcgtcgtttagttttttgtggtttttcgttgagtgggggtgtagaagaggttttcggggggattggatatgggggagagggatttgggttaggggtttttgattgtcgtattattcgagtttagatggagttgggggaagatggtagtgtttataagagtattttggtgagggagttttgggatggagttggggtgaaggatggtgttttgttggattataaatgttgtttgaggtttgggtagttaaatggaattgaatgtagttttaattttgatttttggttttggtagttatgttttatttttaattttattttttaaattttagtttttaatagaagttgaaatttgttttattttgatggttattttgtattagttgttatattttaaatttttggtcgtcgtgttaaaattttagaattaatagtagtttttttatagggaagtagttttgttttattgggtattatgtgggttggtttatggggtataggaagttattatattgggtttttttgtttattttaaagttttggatataagtaatattttgtggttgggtttagtggttgagggtagaaggatgggaaattatggttgattgattgtttttttggttttttgttttgttaggtgataagttaggataaggttttaagtgttattagtcgtgtttttaagaaaaataatcgtgattttgtagtggttttagagtatgagttggtatagttgttattaggggagcgaggttagaggttatgagggaaaggtagattcgggaggagagtggagtatttttatatttgggcggttgtggggggaataattgtgtgtgtgttttatatttattttttgaatttttagagttgattattttagtttcggttaatgtattttacgttatggatggagttttatacgatttttttttgcggtagcggcgaaggttttttattgttatatttggcgttattagtggttcgtttgttttaggaattttttcgagtgagggaggagggggttttttttttaggattaaggttatagggaggaagattgtacgggtattgttttgaggaggaagtttcgttggtttatagaagttatggtgtttatattagatgtgggtagttattttgaatggtggtaattatattatattgagatagaaatttagaaagggagttagttattttggggtagtgaagtgttattggtttattagatagttgagaaatttagttttgtgggaattggtgttttataattaagttggatatttgtgtatagttttttattttttatgagtgtagtatataggtagtgttggaaaaacgtattagtttttgatttttggttatattttaatatgtaagggttaagtaaaggttttaaggttttgagttttagggtagaggggaatggtaaaatgtaggttttcgtaggagtttttttttttattttgggggtttttattattgtgataatattaagataataaattaaaatattatttgaattttatttttttgtttttgtagtatatatgaattggttgttatgagtgggggtggggaattggttgaaggtagatgttatggaataggaaggggtataatgttttttgtttttatgaatagagtaaaaagtgaggtattggtgaaaaaagtttttttagaatagtttttttttagtaatttttttattattggttttttgttgtaaatgtgtataaaataattttaggataaggaaatggtagaataattttatggataatatataaatttgggaggatttataatattataaagtattatatgttgggattttaagttagtttaaagttatatttaagtaaattttaggaagatagaggttgaaaagtattaatagagatgttagggttgttggtaaggagggtaattatattttattttggggttttaggttagagaattgtgtatttttttttaattaaatcgatatttttagtaatatggtatgttgtaaatgtttttttaaaagaattatgttaattaagatgagggagagttaagggttgtatatataggtaagaagtaggtttgaagatatttaggattttatttttaagaaagaatattgtgttataaagagattttaagtgtaagagtttgaatttgagggggtaatataggtggtgtgtgttaaggtggaaggggttgtggggatatgatagaagtgtttggttaggaaatagagttaggtgtttttatattttattagttatagtatagattttagagttgttttatttttttttttttttttttttttttttattatggggttaggttttgttaggagtttttgtttttgttgtttgggttcgttggaatttttgttgtagttgagtaagggtttttttttgttgttttgattgtcgtttaagatttcgaagttgggattcgtatcgtttattaaggagagataagggagataagtagaaagggagaaattagtaggatttattatggagagtgttaaacgtaagaaagagataggtggaaaatttgagatttaggggagggagaagaaggggggttaaaagggaaggaaagggttggaggaattggaggattaggggttattatggagagttgttttgtaatggtttaatatttttattttaatggtttatttgtattatagggtgtagtatacggtggtggaataaaaatttatattttagttgtgatatagtttagttttttttttattgtggttcgagttttttttagtttttgtttgattagtatcggatttagaagtttaaagattacgttggatttatttagtagggttagtttttgatggagggatgggatatatgtgattagaattatggttagtataggttttttttcgttttataaattttagttttttattttttttacgatattattttttgttagttgtgttttaagtttttgttttttcgatatggatttatttaagtttggggatgagaggaaaggtaatttagaaatattaaatgtgttatttatttttataattttagttaggtggatatggatttgaggaagtagaaaaggatgggggtagcgggtgagtgaatagggaagagtattgagattgaggcggggaagtttttgtacgcgagggtttagatggggtaataaattttatttcggtaatggttttgggttgtaagtgtattgggcgagattatatcgattttgtttttttatttttttgtagttgttgatatttttttatttttttttgtagttttttttggattagtttcgttatggcggggatgaaagtttattgggtgcgagataagggcgttgggttttattttttggaaggtatttgagtttttttttttgatttggtttgcggaaatgatagtatttttgagaggtagttttgaggggtatcgtaatttttttttcgtttcggatatcgattttattttgtttttaggagatggtgggcgaaacgtaagattttaagttttttaatcgaaattttaatttatttacgttttttttttagtagtaataaattcggaagtaaataaggaatgttgggaaaagattgtgtcggaagtttttttttgatttttgatgggaagtgtagttttgatatgtttagggagtggagttttgttaaaaagattagattaggatatttttaggtaagatggggaaattaatttagaaaaagaaatcgtatcgttatttagtttttggtttcggatttgttttttttttttaagttatttttgtataagttgtcgttcgcgataaggtgttaaaaattgtttcgtttttttaaggagagcgtgtttttatttaagatggtatttagagagttttatatttggtacgttgttgattggatgaaggatagagggttttcgggagtttttaagtcgattgtgtggtagttgagaggagttttgtacgtggatcgtcgttcgggtgggcgagatggagatagtttttaagtcgggtaaggatgtttcgtttaagaaagataaattttagattaagagaaaggtagaggtttttttgggtgggaaacgaagtttttagttgtggggtcggggggcggggcgtgagtgcggagtttttgatgtgtttgtagaaatcgcggcgatattgggaggaagagatcgtttcgattatagtcggagtttttttagggttttttcgtaataagaagaatcgggagtttcgtttttagagattaaaaaatgtttatattttaaagaagtttcggatttttaagaagttttaggtttcgaagaaatttcgagaatggaagaattcggagttttagcgcggtttgttcggggtgagcgtgggatttgatgggtggcgaggtaggtcgtttcgttttttgagagtgagagggttggggttaatttaaggttgtttgttaattgcgttttttttttttttaggtttaagatttatttttaggtttcgttttcgtttttgtggaagtggtttagaagttttgtcgtattgataaatttcgaaaggtgaggtttagtcggagagttgggaagtgttggaggtagggagtgtttgggtgagttggatggaggttgggataggtagtttttttgtgattttatttattttgtggtttttttgttatttttttttattaataatgttatagttattatattttaaagttaaaattcgaagtcgatttgaggtggttgaagttgaggaagaggaaataagtattaaagttgttcgttttgagttgttgtttgttgaagaatttgggtgagtgagttttaatttggatttttattttttgttttttgggattgttttttttcgtttttatgttggtatatttgttttatattgggaagttttattgttattttaatttttgtttttaggtttttggaaggggaggatggggaagatatagtaaagatatgttaggttgatattgtggaggttgtggatattgtaagtgtagttaaggtgagtttgaggaggtaaaggagttaagggattgattggtggtgtaggataatagaggaatgggggttagaagaaggcgttattgtagggtattttttttttttattttttttttttttagtattttgatttgaatttgcggtagtttggattttatagattaaattattttcgaattggaaggtaaggttgaattttagtgatttttgaattaagatgtgtttttttaattattttagttatttttagtgtatgtttgggttgttgatgaggggagggtttttcgatttgtttgggtgtgagggtaagtatttatagtaatatgtgtttgttcgtttggagagatggggttggcgtggggtagattttaagttgtttgagtcggtggttttttgttttaatattttgtttgttttttatttttaatagatatttggtttttggagggcgtcgaggttatgtggttgtttttgattgggtaataaagaagtttatgtgcgagattaacgttatggaggcggtgcgggatattcggttagtggttttattgttagcggttagttggggtgagatagtttatttttgattgaatgatagtttgtgattttattttttaattgaattatttttttttttttttaggtttttttattttgaggtattgtttgttgttgtttagaatcgttggttttatatttatgataattagggtattgagttttattgtattcgtcgttgtgatcgagtaatacggtttgagtttttgtttttttatttttttttggttatagttgtgagtggttatggagtttaggaattggttggaagtttttgggatgattattttttttttaggattttagtagagggaatatagagggtaattaggattgggttattttttttgttttttttttttagttagaaatagggtttttaatttatttggatgtgttagtggggaagattgtggtagttttgaatgttcgagttgggcggttcgatgttatgagttagaatttttataatgtcgttatttatttcggatatagtaatggttagtatttggtttagttttgattttgattattttgatttgttttttttttatatttgtattttatgagttttttaaagttatttttttattttttttttttgttattttttggttttgagtttttattttttttatgtttagtaattttaggtttaggtgtgtattagtaattttggtttttttttttttttaggtattgtgtttttatggagtttagttatgaaggagttattggtaaagattttttgttatcgtggtggggttcgggttgtggtagtagattttataggtacgtaagttattggtggggtgaggtgttaggagttataggtgggtagaaaggtgtggaaggtagtgtgttttaggagtatagagtttaaagttaggatgtttaggtttaaatcgtagtgttattacggatgggttttgtaagtataggtatattttataatttttgtgtgttatagttttttgatttcgaaaatggaaatatgagtgtttattttaagggtttataaattttttttgtaaagagttagatagtaaatattttatgatttgttgataagaggtaaaattaaagggtattatgtaggtatttaaatattaagagaaaataaattattataatttttttttttgagatggagtttcgttttgatatttaggttggagtgtaatggcgtaattttagtttattgtaatttttattttttaggtttaagtgatttttttgttttggtttttcgagtatttgggattataggcgtttgttataatatttggttaatttttgtatttttagtagagatagggttttagtatgttgtttaggttggtttcgaatttttgattttaagtgatttgttcgttttagttttttaaagtgttgggattataggcgtgagttattgcgtttgatttttttttttttaaattttttgagagagacgtagttttgttttgttttttaggttggagtgtagtggcgtgatttcggtttattgtaattttcgttttttagatttaagcgatttttttgttttagttttttaagtagttgggattataggtatttgttattatgtttagttaattttgtatttttttgtagagacggggttttattgtgttggttaggttggttttgaatttttgattttagatgatttgttcgtttcggttttttaaagtgttgggattataggcgtgagttattgcgtttggtttatatatttttaggttataaaattaaacgtaatatggttaggtgcggtggtttacgtttgtaattttagtattttggaggttaaggcgggtggatcgtttgaggttaggagtttgagattagtttggttaatatggcgaaattttgtttttattaaaaatttataaaattagtcgggtgtcgtggcgggggtttgtaatttcggtaatttgggaggttgaggtaggagaattgtttgaatttgggaggtaggggttgtagtgagttaagattgtgttattgtattttaatttgggtaataagagtaaaatttcgttttaaaaataaataaataaataaaatataatatgagattggatatagtggtttatgtttgtaattttaatagtttggtaggttgaggtgggtagattatttgagtttagaagttcgaaataagttatgttatttatgatatggtaaaattttgtttttatagaagatagaaaaattagtcgggtgtggtggtgtatgtttgtagttttagttatttaggaggttgaggtgatttttttattttagtttaggaggttaaggttgtagtgagttgtgattatgttattgtattttagtatgggtaatagagtgagattcggttttagaaaaaaaaaataataataattaaatatatttgtgtaatatagatttattaatgggaagaattgaatttttttttttgaggttaatattttgtttaattgatgtataaagttagtgttttagatggttaaatttgattgtagatatttatgtttatgttgatttgtagagattgtaagtattttatttttgaaaatatttttttatataggtaatgataggtgatatgtgaggtgtttgaaatgttgtgaagtatttacgattgtgttattgtgatttgtagtgtataaagtagtagtgtaaattaggatgttgtagtcgttgtcgtgattattcggttgtgtgttgtagagtaaaagtagttatagtattaagtaaatagtgtggtttcgttttaataaaattttatttgttggatattggaatttgaattttatacggtttttatagttttaaaatatttttttgatttttttttaattatttaaaaatgtaaaaattatttttggtttgtgggttatatagaattagatgatgggttaggtttggtttatgggtagtagtttattaagttttggtttaaagtttttatataagttgttgtagatattaagatgagttaaggtatatagtttagtatagcgtttagtaaaatagggagcgttgtgtttattattgttatttaagatgatcgttttttttaggtttggttgatgtgaggggtggaggtggtgtttgttttggatttttgttgtttttgagggagtatttgtattttttatagtttttttgtttgatttgtatttttttttgattttttttgttattaggtatttattgggtatttgttgtgggtagggttttgcgttgaggttttggagataaaaggatgaatcgttgagtttgttttggtgtggtgttttcgttattttttaggtataaaaatttgtggttattttttttttttttttgagatagagttttgatttgttatttaggttggagtgtagtggtataattttagtttattataatttttgtttttcggggtttaagcgatttttttgttttagttttttgagtagttgggattataggcgtttacgaattacgtttagttaattttttaatgtttagtagagatggggttttattattttggttaggttgattttgaatttttgatatcgtgatttatttgtttcggttttttaaagtgtaagtgttgggattataggcgtgagttattgtattcggttatggttatggtttttgagaatgattggttaggtgatgtatttatttattttattattatttttcgagacggagttttgatttattatttaggttggagtgtagtggcgcgatttcggtttattataattttcgttttttaggtttaagtgattgttttgttttagtttttaagtagttgggagtataagtgtatgttattgtatgcgttaatttttgtatttttagtagagatggggttttgttatgttggtttggttggttttaaatttttgattttaggtgatttatttatttcggttttttaaagtgttgggattataggtatgagttattacgtttagtttaggtgatgttattagtttttatatagttattttttgttattttagatttaatgtgtttattattggataggttatcgttttttaaagttttttttgatttgtttttattttttagaatttttttgttatttagaatttgatttaggtatatattattatatttggataatttttttattttttgtagagatggggttttattatgtagtttaggttggtttttgttttgaatttttgggtttaagcggtttttttattttaattttttaaagtattgggattatagagtaattattgtgagttattatatttagtttggttattagtttatttaaagtttttaggatgttgggattattttttttattattcgttttttgtttttgtataattgtattttttttttttgagacggagttttattttgttatttaggttggagtgtaatggtgtggtttcggtttattgtaatttttattttttgggtttaagcgatttttttgttttagttttttgagaagttgggattataggtgtgtgttattatattcggttaatttttgtatttgtagtatagatggaattttattatgttggttaggttggttttgaatttttgattttgtgatttattcgtttgtttttttaaagtgttgggattataggcgtgagttatcgtgtttggtttttgtaattgtatttttgtgaatgagtgatttggttttgttttttttattttatatttatattagtttggttttaggagagttagaaggtttgtttaagggtttttgttttttttgggttattgggttaaagttgtagtttgtttttcgtgggttatttgggttagttatttttgtgtttagggtttaattattagttcgttgaggtttgaagtttaattaatattttgaggttaaatagttttggtttttgtgatttttagtttatttttgtttttttttggttttttttaggagtttgttaggttacgggggttttagtgatgaggttgattattttttttaagaggtgttttggtagtttgtattatgattggattgcgttgattttttaaagtcgaattgttgtttattagtagtatagtagatttttatttggtattgggttggtttttatttaggggttttatagatgggtgtgtggaggggagaagagttagtatgtatttttgagttgttagtttattaaaggatgtgattttgtgttttacgagcgttcggtaatttttggtttgtattgatggtttttttttttggtaaagttagggcgttgattattttgtcggaagtatttagttggtttttttttgggttttattattgtgtaagtttttgtttataagaattttttagttttttttttttgggtttatagttaaggtaaaaaagagattttttggttttttggtaaatatatattttttatttggttggtttttttttagtttttttttttaaggaataatttgaatatagaaattttaattttatttgtaattttagtattttgggaggttaaggtgggtaggttatttgaggttaggagtttaagattagcgtggttaatatggcgaaattttggttttattaaaaattagcggtggtggcgtatgtttgtaattttagttatttgggaggttgaggtacgagaattatttgaattagggaggtagaggttgtagtgagttagggttatgttattgtattttagtttgggtaatagagagattttgttttaaaaaaagaaaaggaattttaatttttgaaagtaaataatttatgtagtatatgatttttggagaggatttggttattaattttttttttttttttttagggaaagtatatagaggggtagggtaagggtttttagtgtattattttattatttttttgagtaggtttttttaagtttttggagtttttattttgtgatttgttattgttagagagtaatgttgggattatgagttgtgggtttttagtttgattttaaagaaattttataaattgtttgtttttgatttttttgattatgttttttattaattttaataaatttttgttttttttttagttttaatattttggtgttaatgtatttgaatttgttgtgtatttattttttgtaattttttgagaattatttagaatggtttaaattttattttttttatgaagtttttttgattattgtatatgttttttttttttgttgggttgtgtgttgtatgtgtgtatagggggatattatatttgggtgtagtttgtcgtgtgggcgttttttttgacgttcgtgttttgagagggttgtgtggtgttagtaggttagaggtagatgttaaagagataggtttgattatttattgatttagtttttttttttttgagttttagtttttttattttttaaagggaaataaaaatagtatgagttgtgtgtagtttaattgagaggatgtttgtggagtgtttagggtgatggtagtggttattattattaatttttttttttttagttagatttgatgtttggatttggttatagtttgtttggtaaatttatttattgatatattaattgatttttttttttttattaggtatatggttatttttggtttagattattagttgaagatttttgatttgcgagggacgtattagtttttgagtattcggattttgttttatggagtagggtatttggtttttttttagaggggattgttggtggcgggaatgggtgacgttgttaatatttgggtagggtagggtaaggttagtttatttttttttgaatagttttattttatttatcggtttttaggttttgtgtatggtttttagttttgtttttttgaagatgtgttgggggtggggtatattgggggtattattagtatgttggtttttggtgagtgggttaggggatggggtttgaagtgaatgaattttgggtggaagtttgggttagagatatttaggaattgggggtttagttgggttggagttgttggattgaggtttttttttatggttttatgtttttttttttttttttttaggggtcggtgagtttaatttcgatggtttggagagtaatttatatagaagtcggaagtagcgttaggagtgggaggtgaaggttttgttagagaaggtgaggtttttttgttggagagggtgagattttttttattgttggagagggttaggttttttcgttttggagagggtgaggttttttttttttggagaaggttaggtttttttttgttggagaaggttaggttttttattgttggagaaggttaggtttttttttgttggagaaggtaaggttttttttttttggagagggtgagattttttttttttggacggggttaggtttttttttgttggagagggtgagattttttttgttggagagggttaggtttttttttgttggagagggtgaaatttttttttttggagagggttaggtttttttttgttggagagggtgagattgtttttgttggaggtgaggtttttttgttgtagagagtgaggtttttgttgttggggaaggtgtggtttggggttggaggtagagaaagtttttttgatgttttatgttgggggttttgggtagaggggtttagtagtttttttggtttttttttttggtgttatttttttgtggttttttgttgagttttgtttttttgtgatatttttaggtatttgtagagtttatttgtttggatttacgagttttggtcgaggtggatgttatttttttggagtagggaaagaaggagtagatagagaggttggtatggagtaggtttttgaatgtttaggttcgtttttttttttatattttttttttattatggtttgtttttagaagtgcggttagtaggtgggtgttgttagttttttgatttcgaggttgtaatagatattatttttgtttttttttttagggttatgattcgtaggttaaggtttttttttagttaaagttaaagtagaagggtcgtagttttacggtaagtttggtgaagaggaagaggaaggttatggatgaggaatatagggtaaatgagtattggtatgggtcgggttttttataggttgtatttttttgtttgtgtttttgtttttgttagtttgttattttttattttgtgtttgtgtttttttcgttttcggtttttaggataaggttcggtagagtttttagtagtagtattataaggaggcgaaggttaagtttacgggggttcggttatttgttttggatagatttgtgcgttgagttagattttagggttgtttgggaatagtttttttttaagattatttgtagggaaatgagtgttttttggaataaggaggtgggggtagtgtggttttttttttaattgggggtggatagttgttttttggggtgggttggtattaaagaggaaagcgattttttggataatgtgtttggattattttgtggatttgttttttttttttttgttaagtatgaggttattttaggatcggaggggttagtgttttgtttttatttttattttatattttgtggttgttgtggttttagttttgttttttaggggtttttttttttagagaggttgtttttttttttatgtttttggagatgttttttttatgtagtagggtttggtagtttttgggttttttaggtttgtggtgttttgggggttttggtgaagattatattgtattcgaagaagtggagataagtttattgaggagtttgatattttttttttgttttagtttgagagaataattgtagtattttttttttttttttttttcgatgattattttttgggttggcgggttaggtttttgggtgttttttatatcgttgtttttagtgagattgaggatttggtataaggaaatagattagttgtagttagtgagggtttttgcgttgggtttgggagagagaaggttttgtttttgttttttttgtggttttaggtatttttagttttgaagttaggttattgttcgatatcgtaggatgtttaggattttttggaattaggagtaaaagggcgtagtttttttttcgttagagttatttattagtttttaggttttttgtattttttaggggtttagtttgtgggacgttagtaggaattttttatagtagtatcggtttagcgggtagtgggtggtattagttagtttgatatattgtgttggggcgaggttttttcgtcgggtatttatttttataaagatattttttaatgggagaaggggtgttcggttggttattttgagaatgagttgtatagtagacgttgatagtatatatttcgtgtttgaggtatagggtggaaaggggttttaggtgtgaggttattgtttttttgatacgcggtgtttgtttttcggtgttcgagaggggtttacgcgttagtgtattcggtttaagtatagaagaggtattttttcgttgtgtaaaatttggttttttttttgtttagtttttttttggggtttcgtgttttttttttattgtttttaacggttttttcgtaagattagttttgatattagtttagggacgttgatatatatattatcgttcgttttgaggacgtatcgggttatggggtagtgttttttagtttagtttagttcgttgagggtttttagggtgaggttgcggtaggagttttggaaggcggtttgtaagatatttttttgggttgttgatttcgaggttaggttatttttttgggaattttatacggggtgttgtgcgttcggtttttttagtaagaatagcgtttgtattttgagttttcgggtttcgcgtagttcgttttacgaagttcgaatggcgtttttttggtttaggtttttcggagtcgtgtatattaggatgagtaggaagggaggggtttcgggattattgtaagttttttggttggggattaagaggcggggtagggttaggggcggtttcggtgaggcgggggttgggagtagggaggttagtgagaggtttagtagttttttttttaatttcgaaggttcgaagagggtttagacgattattagtagtaaagcggcgagaaggaggcgtcggaagagtttgagttgtatggtgcggcgtatttcgaggggattcgtaagagcgaagggcggagattagtttttcgggtttgggttacggtcggggatttaatcgattacgttcgggatgcggaggtttgagcgcgcgatcgggattagcgtattttggggggcggggagaggcggtgtagttgcggatcgcggtcgaggtatgttgcgggggtggttattttgtcgtcgcggtttcgtcgttagtaagtttcgttttatggttggtcgattgcggtatttacggtttttttttcgtttcgtttcggcggtcggtttgtcgttcgttttcgcgttgcgcgtttttattttcgtcggaagcggcgtcggagtagcgcggtagggcgcggaaattcgggcgggtggagtggtattaaacggagtgagatcggtttgtttagtcgttttttattttaatttatcgacgtattttattagggagattatattttttataattaacgttcgcgtttttgtttttgttgtttcggttatagttcgaaggatttttttttatgattagatgattttttaaaagaaaataaaaataaaaataaaaaaatttagagtgattaagatttgtaaatttattttaattgtaattggttaggtttagttaatttattttataatgatgttgtatattaattttagggtgttggtttttaaattggtttgggttagttttttaaggttgaattgttttatttttatatttttttttatagagagggatattattagttatatatagggagattggggggtttgtagtattattattgttaaaattaatagtattgtgtgggtaattgagtagggtagttttaaatggaaaaaggatttagtattttaatattttttattagaatggatagaaaggataggaagttataggtatataaattatttattaatagataaggtttatagatttatttttttttggatatatttacggtgcggttacggcggttagtggttttggtgtgttggtttcggatacgaaggttgtaggtaaaaagagaagagttataggttatgtatagtagaaataaaaggttggggaaaaagaagagcgagtaggaggaatgttgagtcgaggtaggtagggagatgagattttttatttatttttagaagtgacgtagttttttatgggttcgaattttttttagtcgttttaggtttttacggagtttgttgtttagattattggttaggatttggatttagaggagggggtaagggatgttttattttttgattttttatgtttaattttgttaggattttttattttttttttaattttgtttttattttagtatatatttggttgtattttttattttttatatttttttgtttgtttaagaattagtttgggattttgtattggcgtggattttgtataatggtgattatacgttttatttggtaggtagattaaggttagatttagatggatttttttttgaggttgattttatttttagtttttttttttgtttttattttatttttagtgagttttttcgtttttttggtgaggttaatgtttgttttttttaatattatatgagtatattttcggtttatattttgaatgaagtgaggggtttcggaattagtgttgaatttgatttttaaatttttttatagttttatttaaaaagtttataaaggtaggatttgtaataatttattttgtaattttttaggttattttttttttatttatttttttagatataaatcgttcgatagaaggttaattttgggtcggtcgtagtggtttacgtttgtaattttagtattttgggaggtttaagtgggtagatgatattgagggtaggagtttaaaattagtttggttaatatggtgaaattttgtttttattaaaaatataagaaaagttgttgagtatggtggtaggtgtttgtaattttagttatttgggaggttgtagtagaatagtttgaatttaggaggtggaggttgtagtaagttaagattacgtaattatattttaatttgggcgatagtgagatttcgttttaaaaaaagaaaaaagtaattttgtttaggggtatgattgaattatgaatatagaatttagtattatagataattttttgaaagtaggtagtatttttttttttttttattgtttagtatatgtagttgttattaagtgttttttgatttttgtatttaggagaataaggggtttgttattttaagttgatgtagtaaattagggttttatgagttataggttttgattaaggtattgggttgttagttttttagaatttttaagggttataattatttaggtaaattattgtatttttataattaaagtattttaagattataaatttaattttgttagtgtttagaattgattgtttaagttattataaaaagaaattaatgtttatattggtagtattatattaatattagtattagtatttatgttatttgaatttatgaattaaagtgatttggagagtgaaggaggaattgaatattgagttttgttttttattttgtttaattagaatattagaatgtggttttatttggaaataaggtcgttacggaaataattaggtaaaatgacgttatatttgattagggtgggttttagatttaatgataaattatgagagagatacgaagaggattatgagatgatagtaatagattggagtaatgtagttataagttaaggaatattaaggattattgataattattagaagataggaagaggtaaggtaggatttttaagtgtttttagcgttaagagtaattttttgtttagtttatatgaatttgttatagtaggttttaggaaattaaaataaatggtagtttttatttgtaagaaagagattaagggttggttttatcgtggtttatgtttatatgtttgtaattttagtattttaggaggttgaggttggaggattattgagtttaggagtttaagattagtttggataatatagtaagatttagattagttagatgtggtggtgtatatttgtagttttaattatttggaaagttgaggtaggaggattgatttgagttttggaggtcgaggttgtagtgaagagtgatttcgttattttagtttgggcgatagttttaaaaaataaatgtggttgggtgtagtggtttacgtttataattttagtattttgggaggttgaggtgggtggattatttgaggttagaagtttaagattagtttgattaatatggtgaaattttattttttttaaaaatataaaaattagttgggcgtgtgtttgtaattttagttatttgggaggttgaggttgtagtgagataagattgtattattgtatttcggtttgggtgacggggtgagattttgtttcgggataaataaataaatatgattaagggttaaattattaggttgatttagaagagagtagggttttttaaatttattaattaaatgacgaggttttattatgttgattaggttggtttcgaatttttgattttaggggattcgtttattttagttttcgagtgagttattgtattaagttttaaatttaattatatgtttataagtgaaaagatttattttaaaatgggtgtgggaagagatatagatgaaataagatttttaatttttagttagatatatttatgaaggttattttttattatatttatgaatgttgtatttttatttaagttttatagtcggtttttgaaataagtatagtattttatattgttttattagttttatagagtatttaatagaaggaatttttttttataaattttttaatagagttaatagtatttttattattatttattttttaacgtcgtttaagtatttattatgtaatagaagttaagaagataggtttagttttgtacgtatggatatatattggtaggttatttttataattaattatatattttgatttaagggaaaaaaaaagaacgttatgtatttagaaagttaagaatttattaggtttgtggagagaaatatttaagtgaaataatatttttgtatttattgattcgatttttaaaagttaaagaaagatggatgtatttttttatatttcgataggaaaggagtgttaattatggtttatttgagtaaatgttttatttagattttttttattttttatttataggtttttttatattttttatttgttggtatttttatttattttttaagatgtttaataattttttaatttttagggaatataaatttcgtaggaagggttgttgttatgatggtgggatgggtaaagaaatcgaatttagaagaaattttataagttcgtggtttaggaaaattttagcgaattcgggtgagtaattatattttttttttatttttttaggtgaaatgttttggtttgattttagattattattttggttttaattatttattttttgtggtaaatgttaaaggggttagtttttttttaaattattttttttttttaatttagtagttaaggtgatttggatgagatttaagtttttttagttttgttttatttttgtttatgtttttataatttaatttttatttatattttttattttttattttattttatttattttaatggtagtgatggtaaaggttatttttcgtcgtttatcgatgttggtgttgagtattcgtaaaatatgttggaattttttagggattattagagattagttgaaaaagtacgggggaagaaattagatatagtaaattattaaatagtaaggtcgataaggtaaacgaattttatataaaaaggttaagtttgttatataagtggtaagatattcgttttttattttttaggtttttatattatagagtaaattttttagttttgtagagtaggtatatgaagcgtttaagtttgggaaaatgtaatttttggagagaggaagtaggttttttgtttatttttaaaagtgcgtggtaaaagttagagttttttatatacgtttaagttttagatagttttcgtgcgttcgagtagtgattttttttcgggttcgtttttcggaattggaaatttttggtgtttttttttagggacgcgatttaaggttttatatagaaagtcgtaggtttttagggtaggacgtttttagaattttgatagtcggttttttttgttcgagttgcgatgtcgttggattacggtacggattttagttttattatggttgtagtataagcggcggcgtgtaggttttttgtggaagagagagcggaagtgacgcgatattattatatagtttttaggaggaagaggcggtgcgatttaggagaagtgttttcggaaattgttttagcgcgatttggttggatttatgagagtatggtttgggtattataattttcggtgcgtttttttttatagttcgtaaggtttataggtaagagaatagcgaaggtttcggggttagtttgtgttttagatttttatatttttatttgtagttgggtgaagtggttagagttgaaaggggatagttggagttaaataatttaatttaaatatttgggaacgatttcgcgttgaggaagattttttgggatttgtagttttatttcggggaacggattcgtcgggattgatagttgtcggaagtgaggttgcggggaatggtcgtcgttgcgattatggcggttgcggttcgggaattggtgttgcgggttgggattttagatatggaggaggaagagggttcgttggtgagagcgcggagttgtttttttttcgtagtttcggtgtttttagttttagaaagatttgagttgggtttaggtataagggtgggaatttggttgttattcgtgatattatttgtttggtttttcgtatttttttttgtgattagattcgattttgagcgggattttagtggttgaaatttatgttttggggtataaaattttaattttattttatattttggggtagagttacgaagtagtatagtgtaaaggttaagaatatggtttttgaagttagattgtttgagttttatttttgttatttatacgttgtgtgtttttgggtaagttaattagtttttttgtgttattattttttatatttttaaggtgaggaagatagaatttattgtatatatcgtcgttaggattagatgaatatgtgtaagattgtatttggtatgtaggtaaatattatgtgttttgatatttttagaaagtttggggttttttagaggtgtgatagaatatttaagatggtaggagtttgagggttttaaatttaagtgtaagttttgttttattttttgtaatttttagttttttttattcggttatttttattgtatttttttttttttttttttttttttgagacggagttttgttttgtcgtttaggttggagtgtagtggcgcgattttggtttattgtaagttttatttttcgggtttacgttatttttttgttttaattttttaagtagttgggattataggcgttcgttatcgcgttcggttaattttttgtattttttagtagagacggggttttattgtgttagttaggatggtttcgattttttgatttcgtgatttttttatttcggttttttaaagtgttgggattataggcgtgagttattgcgttcggtttttattgtattgttttgttttttatttttttttgttttttttagacgggtttttttgtgttatttaggttgattttgaatttttgatttttttaaataattttttcgttttagtttttaagtagttgggattataaggagtttattattatgttgggttatttttattgttttattggatcgttttattttttgtcgtattttttatttattagtataaaataggagagtgggtataacgtgagatttttagaattttttaaagtagtatttgtggtttttagtaaaagtagtttttttttatttgaaggattggggatatttaattatattttttttttttgttttttatcgtattttatttttattaatttatttttttttaggcgggtggttttgggttttaggaattattgtaatttggggagttggatattatttttgatgaatttattttggatgaagtggatggtaagcgatggtatggggtgggtgtagtatttgtaatttgagaggtatgggggttggaaggaataaggtagggattggtgtgtagatatttaatgtggggagagggagttgtggagttggatttttatgataaatttttatttttagtttatatttaggtaaatttggaggatgagttagtaaaggaagtttttaaaacggtgaggtttttttttgtattaatttgtttttttatttattttattttaaaaggaaaaataatagttttttgtttttgttgtattagtttggtatttgattttttagttttttattgattttgttatagtgtttttttattgagatttttttttgatttgttatttttatgtttttttagggtgtagattttcgttattatttaaagtaagttgagttggagttatagtagattgaatagaaatttattcgggattgtattttttagtagagggaaggggtggtgttattgatatggggattttgtggcgtgtggtatagatgttttagttggggttaatatttttgaggtttttattattttaaagagaaattggagaggtattataaatttgaggattttttatttttattatgaggttttttgattttttgtggattagatatttaagagagtgagaatatagtatttttatataattagattatagtttgtgatgttgttttggaggttagtaattatgatttgtgatttttaatagttattttgaattagattatggattttggtgttatttttaggttattagttttaagatggggataggttagggttatttttaagatgattttaggagttttttttgttattattgttatatttaatgttattttttgataatttggggtgttttattatttgttatttttaaggattgataaatattgaagattttataaagagtttttggtggtttatttattttttataaattttatagtatttcggtaatatttattttttttatagcgaatggagtagatgttgggagttttttagagtgattttagttttattagttttgagattcggatattgtaggaatagttaggagttatgaatattcgatttcgaaatcgttaggtagttcgggggaaatttggggagtttgttgatggtttggtggtgttttttgttttggttacgtgagttattagtttgaagggttataatgtttatagtaggtggatgggttggggtgatttattttatttattatatgggttttttggttttaggttaagtgttttttagaaattagtagttaggttaattattatttttttaggtatgtattaggtattaaagattaagattaagaatgatgtaagattaggtgtatagtggggaggtttaggaatagaaaattttgtatatgtgttttgattatatggtataatgtaaggtggtagagatgataggggttggaggtaaggagtgtggtttgggtttggtttagggatgtttgggttttttttgtaatttattttatttttttttgttaattagggtaattttggaggttttagtgatagagtttaggtttttggagtagttataggagttggatgttaaggtagtcgtagttagagagtaggaagttagaggtatagtagtttgcgtagatgttagaggcgtgttcgatcggtttcgggttaaggtgggaagtagggatggatattttggaggttattggaagtagtttttttaagatttttattatggatttttttggtagagtttattgtagtttgtttttagggattttattttgttttttttgggtagttttatttttgtttttttgggtttttttgaaaattttgagaaatattaaagagatatttattatttttttgtttatgtttattatttgttgttttttttagttttttttatatagtaaaagggttgtagttttatgttttgtgtttggttttttatatttaggtagtgacgaagattcgagagtttattttttagaagatttatttttttaggaaatttatgattaattattagattttttagacggttttgttgaagtataggttataattttaaggaagtgtatgggatggtttttgagtttttgagcggtttagtgtgggtatttggttttttgggagataggtagattgatatgtttttgattttttaggtttttttattagtttttgttgggtaatgaacgagtaatagtaaaggagattagggatgaatatgtggagacgttgagtaagatttatttgttttattatcgtttttatttggggcggtttatgaaggtgtaggtaaggttaggagggagaggtatttttgggtatatggattgggaggaggggatatttttgggtaaggaatattttattgtgttgtgggaagagacggttattagtttttttttttttttttttagtatgaggaagtcgttgagaaagatgatttaatgggtgtggaagatatagtaaagaaagatattttagtattggggaatttttatgttaggttttgagagtgggaggattttcgattttagttattaatgtattgttttttatttttttttatgggattgaaattttttagaatgtgatgaaagttatagtttttttttttagaaagatgtatatattattttgatatatagttttgtatatgattgtaagggagggagagatattttgaagtttatttatagatgttagtacgtggggttttagtattgggaaagagggttggttaggttacgtttgtttgtttggggtttttatagatagtgagtttttgggtttagttatggttttattgttttttttgattttgatttattttacgattttttttaaagttatcgtttcgtagtaggaatattatttttattttaggaattcgcggttttgttattttttttattgaatttgaggtttttattttggtgttttatatagcgtagcgcggagagtagagggtatgaggaggaataagttttagttacgaaagaggttttgagtacggtggggagggaaggttagattttagggtagagttttttaatttgtaggttttgttttaatttttttagatttgggagtggttttttttaattattttagtttgttgtgatgtgaaaagagttgggaattattgatttaagggtatgtagaggggagagattggatgaggggaatgatagttagaggtaggtgttgaggtggatgtaggagtagtaatagtaggtgggtgtaggttttttttgtatttttatgtttttttatttttttagtgtttatttagtttgtttttagatagttcggatttagatagatgcgaagggtttgtttagtttttattatttaggtttattgattttttagttatatttatgggaagttagtgttggggtttattttttttgttttttttttttatttttttttttttagtatttatttgaggttttttttcgtagttagtattacgtttttttagataatttttgtcgcgaatatttttttatttgtgaattttttgttgtgtttggtttagttgtatacgatttgttttatgttgttatgggtcgtatatttagtatgattttggtaagatttttgttttttgtattatttaatatttttgtttttagtttttattagtagtatagtggggttatgattttggtagaattgaaattaggatcgttttattttaaaatgtttaagttttggttgggcgtggtagtgtatatttataattttagtattttgggagtttaaggtagtaggattgtttgagtttaggagtttgagattagtttgggtaataattttatttttataaaaaatgaaaaattagtcgggtgtgtgttgatgtgtgtttgtggttatagttattaaagatgttgaggtggaaggattgtttgagtttaggaggttaaggttgtagtgagttatgtattttagagtgagatttgttttaaaaaaaaaaaaaaaaaaaaatagttaggtgtagtggtttacgtttgtaattttagtattttgggaggttgaggcgggaggattataaggttaggagtttgagattagtttgattaatatgatgaaattttgtttttattaatagtataaaaattagttaggtgtgcgcggtttgtaattttagttattcgggaggttgaggtaggaggattgtttgaatttgggaggaggagattgtagtgagttaagattgcgttattgtattttagtttgggtgatagagcgagattttattttaaaaaaaaaatttgttatttagatttgttatagtgttatttttttatgaaatttttagtgcgtagggtttttgagattatttttattgttgatttataattaggtaatagtacgtgaaaattgagggttttttaaattttggtgtttaaatttttgatttaagtttagttttgaattttgttgtgataggtttgtgattatagattttggtgtggttaggtgtagtggtttatgtttgtaattttagtattttgggagattaaggtaggaaggttgtttgaggttaggagttcgagattagtttgggtaatgcggtaagattttgtttttataaaaaatttaaaaataaatttaattaggtatggtggtatatatttatggttttagttgtttggtaggttgaggtgggaatattatttgagtttagatgtttgaggttgtagtgaattatgattgtattattataatttagtttaggtgataaaataatttgtttttaaagtcgaaaatatcgggtgtagtggtttatatttgtaattttagtattttaggaggttgaggtgggcggatcgtttgaggttaggagttcgagattagtttgattaatatgatgaaattttatttttattaaaatataaaaattagtcgggcgtggtggtaggcgtttataattttagttatttaggaggttgaggtaggagaattgtttgaatttgggaggtaggcggaggttgtagtgagtcgagattgtgttattgtattttagtttgggtggtaagagtgaaattttattttaaaaaataaaaaaaaagttaaaaatatagattttggataggaaagtagggggtagttttattttacgttttttttttttgttttgtttagtgtattatttttaaagaaataaatgcgtttgtttatagttattgaggataataaattgatatttttttttaattttttgtttgttttttaattatatagaaatatttggatttttatttagttgattgttacgatgttattgttgtttttttttgtatttatattgtttttcggtttcgtaatattgtagtaaagagggatgtttttgttttggataggttattgaattttggtttttgatgtttaataggttacgaatttttttggttttgtatgattttgttttgattttagatttttattgatttggtattattaatttttatttttatttatttgtttcggaggtagtagtgttgttttttgatttatttttttttaattattgttttttaatttttataattagttattgattattaaattgaatgatgttttatttttttttatttttttttaatattttttgttggttgatttttgattttgattaagtttataggtattgggaataggtgtttgttttgttatggttacggtttgaattgattttggagatgaatgtttagagcgttcgaagtattgatttttagcgtttaggggggttggatattcggttttattatgtgagggagggtaagggtaataaagggtttttgaaaggtagggttttaagtattattgtgggggttggttaaggttatagttgtgttatgggttacgttatgagtaggtgttttgggagggtggtgaaatttatggtgagtggtgtattgtgggtaggagggattgaaggtagagttatattatatggaggtgggttggttaaggaagttgggaggttgtgttggttgggttaggaggtgggtgtgatttttttttttatttttttttagattatacgtcgttatgtagagttttttttcgtttttgttagtattaattagataatttttaatgaacggattatgtaattgttgggatagttgtaggtgagggtcggataggagatattttttagtagtagggttgtttttagtgggtggagtttgaggaggagttagatggggtttagatgattttgttttttggtgttatttttttttttttgtttttttaggtggaggtggagaattttgtttttcgagtggtagttgagttttttttaaggaaggagtagtttgtgtttttgattaataattatgatatgatgttgggtgtgttgatggtaataggtgttttttttttttgtttttttatttagaaaattcggttttttttattgttgttagttttgtgagggtagagatgatgtttgttttgtttagtgttttatttttggagtttggtatagtgtttagtttagtataataagtgtggaatgaaggggatattttgaagtgaaggattgttttttttaaattagatatttttttttgtttttttttaggagcgggttgtagatgatagtaaagaggttgagagtttttagtagttgtttaatgttcggatataggtaggggtgtggggaaaagggaagagatagttttttgtgttgtttttagttttttttttttttttttttgtgtgtgtgtgtgtgtgtgtgtgtgtgtgtagggagtggtataatggattttaggtatgcggaattattgtaatttttgatttataatatattgttattattggtttattttattttattttgtttttggtttttttttttttttttttttgaggtaaagtgttattttgttatttaggttggagtgtagtggtatgaatatggtttattgtagttttaatagtttgggtttaagtgatttttttattttagttttttgggtagttgggattataggtgcgagttattatgtttagttaattttttatttttagaatgaattttatttttttttttatttatttttttaagtatttattttttgtgttataaataattcgattatattaagttattttaaaatgtataattaagttataattgattatagttattttgttgtgttgttaaatagtaggttttatttattttttttatttttgtttgtatttattaattatttttattttttttttagttttttattagtttttttagtttttggtagttatttttttatttttttcgtatatgagtatatgagtttaattgttttgatttttagattttacgaattagtgagaatatatgacgtttgtttttttgtgtttggtttattttatttaatataataatttttaattttatgtatgttgttgtaaatgattgagttttatttttttttatggttgagtagtattttattgtgtatatattttatattttttttatttatttatttgttgatggatatttaggttgtttttaaattttagttattgtgaataatattgtaataaatatgggagtgtaaatatttttttaatgtattgatttttttttttttgggtatatatttagtagtgggattgttgaattatatggtagttttatttttagttttttgagtaatttttaaattgttttttaaagtgtttgtattaatttatatttttattaatagtgtataagggtttttttttttttatatttttgttagtattgttattgtttgttttttggataaaagttattttgattggagtgagatgagattttattgtagttttgatttgtatttttttgataatagtgatggtgagtttttttttatatatgtttgtttgttatttgtatttttttgaaaaatatttatttaaattttttgtttattttttaataggattattagattgttatgtagagttgtttgagttttttatatattttggttattaattttttggtagatgggatgtgtaaatattttttgtttttttattttattgtttttttagttgtgtagaagttttttttttttttttttttttttttgagatggagttttgtttttgttgtttaggttggagtgcgatggtgcgattttagtttatcgtaattttcgttttttaggtttaagtaatttttttgttttagttttttgagtagttgtgattataggtatgtgttattatgtttggttaattttgtatttttagtagagatggggttttattatgttggttaggttggttttaaatttttgattttaggtgatttgtttagttttgttttttaaagtgttgggattataggcgtgagttatcgtgtttagttgtgtagaagttttgtaatttgacgtgattttatttggttatttttgttttggttgtttgtgtttgtggggtatggtttaagaaatttttgtttagattcgtgttttggagattttttttagtgtttttttgtagtagttttataatttggttttagatttaagtttttaatttatttgatttggtttttatatgtggcgagagataggggtatagttttatttttttgtgtaatggatagttagtttttttagtattattattgaagagattattttttttttttttttttttagacggagttttgttttgttatttaggttggagtgtagtggtgtagtattggtttattgtaatttttgtttttttggtttaagtgatttttttgttttagttttttgaatagttgggattattgatgtttgttattacgtcgggttagtttttgtgtttttagtagagacgggattttattatgttagttaggtttgttttgaatttttgattttaagtgatttttttatttgggttttttaagtgttgggattataggcgtgagttatcgtgtttgattaagagattattttttttttagtgtatgtttttggtatttttattaaaaatgagtttattgtaggtgtgtgttagttaattttttaattttgtaaagatagttgtttttataaaagataattgttgtttgggttggttttgaattattgtttttaagtgaaaaattttatgatttttttttttttttaaagacggagttttattttgatttttatattggagtgtagcgatacgatgttagtttattgtaacgttcgttttttaggttaagtgatttttttgttttagtttttgagtagttgggattgtaggtacgtgttattatgtttagttaatttttgtatttttagtagagatggggttttattatgttggtttagttggttttaaaatttttgattttaggtgatttattcgttttagttttttaaagtgttgggattataggtatgagttattgtattcggtttagattttgtttttaatgatattggaaaataacgaatttttgttttggtatatatatagttttatttttaaaagtaagaatatatataaaaaaagggggaaaaaagtaagaatataataaatgtaatatttagattaacgagtatttgtgtacgagaagtatagggatggttttagtaggattttatagtttgatggtgatttttgttaagttgttgttatttggattgtgtggtgtgtttgtgagtgtttatattattaaaaaataaaatagttattgtattgggttgttttattttttaatgatataaatattgatgagataaggtaagaaaatagtaaggtaaaaaagaaaaaaaaaaaagttaggtatggtggtatgtatttgtagttttagttatttgggagataaaggcgagaggattattttgaaatttaggagttcgagattatagcgagttatgattatgatattgtagtttatttttggtaatatagtaagattttgttttaaatagtaaaataaaataaaaaattttagaattataggattttttttatgtataatttttttaatattgttatgttattgtatatggttatagtttatttttttttattgttatatatgatttgtgtgattaaatatattttataaatggattgtttttagttttttgtttttgtgagtattgttttatgaataattatgttttttagtatatatagatattgattatttttattaaaagttttttttgggtataaatttaggatagtagttttgttgttaataagatatgtagtattagtttttatgagataatgataaattgtttttttaagtagtttttttttattagtaatatgtaagaatttttattgagttatattttttttaatatgtggtattattaggtttttgttattttttttttttttttttttagagattaaggatgttgttaaagatgttcgggattagaaatgttttagattttgatttttttcggattttggattttttgtattatttttattggttagtatttgtagtttgaaaatttgaaatttgaaatgttttaaagagtattatttttgagtattatgttgatatttaaaaattttcggattttggagtattttggattttagattattggattagggatatttaatttgtattttagtgggttttatttgtaattttttgattattaataatattgagtattattttaaatgtttagtaattatatgtaggggtttagttaggttggtgggaaaaatattagtgatgatagttataaatttttttggaaggtttaagagtttgtataattttagtaatagatatggttgaaggcgatttgatttttatttttagttaaataaattagagtaataataaaggaatgtggggaagttatttaggtagtttgtttatttatatggttttaagattaatttttgatgtatcgtaggtgtttaattgttttttatttaggaagtttataatgttagttatttcgtagtggtgttgatttaagtttttgttaattaatttttattgaataaatgcgagttttattagttggttagggtcgttattgtaattgtttatagtattttttagggagtttgtaaatagtttggatatatttagttggattggtaaagtagagtatttgtgtgttagtgtattttatttattcgttgtcgggttaggggtttgtaagggatagattttttgaagttggtgttttgtgtgaggagcgttattataattatataattttttttttttttgtaaaatggttgttatagtatttgattttttaaaaatcggtttgtggttgggtagggtgtatatttgtaattttagtattttgggaggttgaggcggatggattagttgaggttagtaatttaagattagtttggttagtatggtagaattttgtttttattagaagtataaaaattaattaggtatagtggcgtatgtttgtagttttagttttttaggggcgttgaatttgggaggcggaggttgtagtgagttaagattatgttattgtattttagttttagttatagagcgtgatttttttaaaaaataaagaaaaaaataagtttgttagtattttttatttataagagttttttgtattatttatatattaattttgttgattatacgtaggttatagattattttttagtatgtatttttttatttttttttttttttttggtgagatgagggtttttttgtgttgtttaggtttttgggtttaagaaatttttgtatttttttttttttttttttgagatggagttttatttatgttgtcgaggttggagtgtaatggtgtgattttagtttattgtatttttgtttttcgggtttaagtatttatttttttttagttttttgagtagttgggattataggcgtgtgttattacgttcggttaatttttgtatatttagtagagatgggttttgttatgttggttaggttagttttgaacgtttgattttaggtgatttattcgttttagttttttaaaatgttgggattataggtatgagttatcgcgtttagtttttgtttttttaatgttgttttttgattaaagaaatttgtaattttaatatgattgaatttatttgttttttatttttatgtttttgtttttagtaatagttttgttttgttatttaagttggaatgtagtagtgtgattatggtttattgtagttttaattttttgggtttaggtaattttttttttttagttttttaagtaattaggattataggtgtgtgttatatgtttagttaatttttgttgttgttgttgttttgtagagatagagttttattatgttgtttaggttggttttaaatttttggttttaagtgattttttcgtattagttttttaaagtgttgggtttatagttattatttattacgtttgattatttttgttttgtttaagaaatttttgggttgggtgtggtggtttacgtttgtaattttagtattttgggaggttgaggcgggtggattacgaggttacgggatcgagattattttggttaatatggtgaaatttcgtttttattaaaaatataaaaaaattagttgggcgtggtgatgcgtatttgtagttttagttatttatgaggttgaggtaggagaattatttgaattagggaggtggaggatgtagtgagttaagatcgtgttattgtattttagattggtgatagagtgagatttcgtttaaaaaaaaaaaaaatgaaattttttattattttaaggttagaaaaatattatgttatattttttttttaatattgtagaattttggttaggtgtagtggttaaagtttgtaattttagtattttgggaggttaaggtaggaagattgtttgaagttaggagtttgagattagtttaggtagtatagtgagattttatttttataaaaaattaaaaaaatatattagttaagtatagtggtatatatttgtagtttttgttatttaggtagttgaggtgggaggattatttgagtttgggaggtcgaggttgtagtgagttttgtttgtgttgttgtattttagtttgggtaatagagtgagattttgttttaaaaaataataataaaattaaagaataaataaatatatagagagaatttttttgttatttttaagttttaaatttatttggaattaatttttgtgtgtgatgtgaggtagggatttattttttttttttatgtggatggttggtttagaattatttatagaaaatttttttttttttttttttttttttttttttttttttttttttagatagagttttatttttgttatttaggttggagtgtagggttataattttagcgtattgtaatttttgttttttgggtttaagtgatttttttgttttagttttttgagtagttaggattataggtatgtgttattatatttagttaatttttgtatttttagtagagatggggttttatcgtgttggttaggttggtttcgaaaagtttttatattttaaaaagtttttaaggattttgattagaattatattgtttatagattaatttggaagaattgatattttatgatattgaaattttttatttatgattatgattatgggttttttatttttttttttttttttttttttttttttttttttttttttttgagataggttttgttttgttatttaggttggagtgtagtggtataattatagtttattgtagttttgaatttttgggtttaagtgttttttttgttttagtttttcgagtagttaggattagaggtatatagtattatatttggtttttttttttttgtagagaatataaaatttaaaaatttaattttttgtagtgttttattaaattgggattatagatgtgagttattttatttggtttttttttttaatttttaagagagttttttaatgttttttgataatttttttaaatttttagtataaagatattgtaagtcgtttgttatatttttaggtgggtataatacgtatgtttagttttattaggaataaataaattttttttagttttttgtttttaatattttatgtttttgattttttattttattggttaatatttttaggatgatgtttagaagttgaatagaaaggtgatagtgagaattttttttatatttttgattttgaaagaattgttgttggtgttgtggtttatgtttgtaattttagtattttgggatgttgagatgggagaattttttgagtttaggagtttgagagtttgaggggatttgtttgggtaatatagtgagattttattttttttttttttttttttttttagatagagtttttttttgttttttaggttggagtggtgtagtggtgtaattttagtttattgtaagtttcgtttttcgggtttatgttattttttttgttttagtttttcgagtagttgagattataggtgtttagtattatgttcggtattttttttgtattttgtatttttagtagagacggggggttttattatgttagttaggatggttttgatttgatttcgttatttgttcgttttggttttttaaagtgttgggattataggtgttagttattatgttcggttaagattttatttttttaaaaaaaaaaaaaaaaaaaaaaaaaagttaggcgtagtggtatgtatttgtagttttagttgtttgggaggttgaggcgggattattgtaggagattaaggtatttataaagatgtatttaaattagttgtttttgttgagagtagttgggatttgttattggatttgttaggtatagagattcgttagttgttattaatgtttttggttttttttggttagttgttgttttatattacgtaggaaagattgttaaagtttagtgtattgttttttttggttatttttttgttattaaggtgtttttttttgcgttatagaaagtttaaagtttatttaagtttagattagtatttttataggaatataatgtatgttataaatgtgagttatttaaataattttaaattttttagaagttatattaaaaagtaaggagaaatagatgaaataattttttaaattattatatttaaaatattattattttaatatataattaataaaaaatagtattgaggttagtacggtggtttatatttgtaattttagtataggttaaggtagggaggatcgtttgagtttaggagtttgagattagtttggataatatggtgaaattttatttttataaaaaataaaaaaaaaatgagtgggatatgttggtatatgtttgttagttttagttatttaggaggttgaggtgggataattattgagttaggaaagttgaggttgtagtgagttgtgattgtgttattgtattttagcgtgggtgatggagtaagattttgttttcgaaaaaaaaaaagaaaaaaaagatatatttaaaatttattttaagatgaagtttttaaaattaggtgtatatattatgtttataatatattatataatttatggtttttgtttagtaggggttattattgttagtttaatttttttttggtaagtttattttttgtgttttatcgtatattgttatattattgtttgtatatgtgtgtgtgagattgtatttaggtaattgtaataggttgaatttggttatttaatttttgtttaaaattatattataaagatgttttgattatagaaagatttttttttgtagtatattagttatttgatatttttagtggatataagtgaatattttgagggaagaatagaaaagatataatttttatttatttatttatttatttatttattgagataagttgttgttttgtcgtttaggttggagtgtagtgatatgattttggtttattataatttttgtttttcggtttaagtgatttttttgttttagtttttttgagtagttggggttataggtatgtattattatatttggttaattttagtattaataatttatttttaaatggaataataattttattttttttttattagatttttttgtttgggttgtttgtttttatgagtttttttgtttgaattttttttttatattaaataaaaattaatattttattatgggaaattttattatgttattagaaaagtatagtgaatttttaggtattattagtgatattcggtgtatagtagtttacggatagttttgttttatttatattaatatttattgtttattttttttttgtgttttttagttattttgaattaaattttatatatatatagatgaatattattattttatttgtattagaatgttatttttattaagaaaattatttttgagatagggttttgttgtagtgtttaggttggagtgtagtagtatgatataattttttgtagtttcgaatttttgggtttaagtgatttttttattttagttttttaagtaattgggattataggtgtgtgttattatatttggtaatagatggttttaaaaattataatatattattatatttaaaaaaattattttatttaaaataattatttagatttttttagttattttataagtgatttttttttttttttttttgagatatagttttatttttgttgtttttaggttggagtgtaatggttcgattttggtatattttaatatttgtttttcgggtttaagtaatttttttgttttagttttttgagtagttgggattatagatatttattattacgtttagttaatttttgtatttttagtagagataggattttattatgttggttaggttggttttaaatttttgattttaggtgatttattcgttttagttttttaaaatgttgggattataggtatgagttattgtgtttggtttttataaatgatttttatggtttaaattaggatttatataaagtttatatatgtgtttttttttagtttatagattttttttttattttttttgtaatttatttttggaagaaattgagttattgagttatttgttatttagaatgatgtatagtttagattttgttgattgtattttatggtgtggttaaattttttttgtttggtgtattttttataagtgtgtaattagatggaaaggtttggttagatttaaattagtttttttttttttatagggatatttgagaggtagtggtatgtatttttattaggaagtatataatgtttttttggttttttttgtgatgttagtagttattaattttagtgtttagatatattaattagatttttgtattttttattattttaaaattttttattttttgtttgtgttatattttgagttttttttttagttataaattttaatttattgtataatttttgttaatttgttgattttttaaaattggttttttatatttaaaaaaattttttttttttaagtttgtttattttttatagtttttattaattggttatttttatattttttttttttttttttttttttgagacggagttttgttttgttatttaggttggagtgtagtggtatgatttttgtttattgtaattttcgttttttaagtttaagtgatttttttgttttagtttttcgagtagttgggattataggtatttattattatgtttagttaatttttgtatttttagtagagatggggttttattatgttggttaggttggttttgaatttttgattttaggtgatttgtttattttagttttttaaagtgttgggattataggcgtgagttattgtgttcggtttatttttaattttagatattgtatatagtataattgttattcgtatcggatagtttttaaggttagtagttattgtttattgtgtttgttgatttttttggtagttgttttttttttgtgtttagtgatttttgagtttattgtttgattttaattaggggaattgtatgggttaaaattaggattgaggatatttttttttatagaggattttttttaatttttgtagtagttgaaagatgttatttagatggatttatattagttatgatgttagaattgggtaaatttgttgatattaggatatttgtgtatatgtgtttgtgtttttttaggaatttattgaagagttgttgttttttttttttgggggtttagtggtatttgtgaaggaggttgaggttttgattgagcgtggataggttgagcgatttcgaggggaagaaggtatgaggaaaatatggtaatgatgggattagtggtaagggaagtggaaaagaaaaatgaaaggatgtagattatatggtgggggaatagagtatgaaagattggattgagagaatattagaaaagagggtttgatgataaggatggttatattttggggagaatttagtggagttgaagattagttagatttttttttgatattgtttttttttgttattagttcgggtaatttagttgattcgtggttttggtagtttttggaaattattagtggaatttttgagttaggatgtaatgcggagttttattaattttagaaatggtattagtattatttaggtgatttgtaagttttaggttttatttagattttttattattaattattttttttatttttttgttgggtttagtattatttaagtgatttttggtttttagttattagttgtgtttaaagttttgtatgagttttaatttgatttttttttttttgtttgttttgttttttttttgagatagagtttagttttgttgtttaggttggagtgtagtggtatagtttcggtttattgtaatttttgttttttaggtttaagtgatttttttgttttagttttttaagtagttgggattataggtgtttgttattataattagttaattttcgtatttgtagtagagatggggttttattgtgttggttaggttggtttcgaatttttgatttcgtgatttgttcgttatggttttttatagtgttgggattataagtgtgagttattgcgtttggtcgtttaatttgatttttaattattattattagtattattttacggtttgattttttaatgattttttttgattagggagcgttgatttagttgatttagttttattatcgtttttatcgggtgttgttttagtcgtagtttcgagttttttttgttcgggttgagtttattaatatttattattttatggtggagtttaagaagtataagtttaatttttgatgtgttagaaatcgttttgagatttgtcggttatttttatggatttttgtattttattttatatttttttttatttggggtattttttttagttttttttttgttttttaggtttttgatatggtttatttgtttttatttttagtattttgtttaataggataagttggatttttttggttttttgaatattttagtgtttttaggttttttaagattatttttttgtgggtttttaaaatggtttttattatttttttagtttgttattttttttttttgtttttatatatttaaggtttgtttttttttttgtaaaaattattgttttaatttttggtttatttaattagttattatgttttgaggtatgaagtttttttagtttttggaattgttggtaaggggtgattgtttttgagttattgtgttttttaaagtgattttttttttgtagttttttgatttaagattttagtaatttgaatattaatttttttttttttggtttaagaattatttcgaagttagtttgtagaaaataaatatttagtatgatatgatatttattttattttttttttttttttttttgaaggttttttaggtggttttatttttagaatgattttttttttttgattattttttgggtttatattttttttggtgggtgtaatttttaatttttagttatttttaggttattggaggaaggtggtttttggttaaaatagtagatgttgtaagggatgagaattaggtcgcgtagttttagatattgttttaagggtttttttgggataagtttaagttgattttggaatttttttttcgtagtagttttatagtttttttggttgtggttgtgatagttttttgttcgggggttgtagtatttaatttatatttatatcgttggggtagggttagattaggcgaaattcgtattattcgtttgtttgatttggagtttttttgttgttttcgtttatacgtttcgtttgaatttaggttttagattggagagatacggggatttttttaaggtttaagaagagaggcgtagttaaggaaaaatgttacgttttttgtgttttttatttttacggtttaaatattttttttttaggtttttggagagtggtggaaagcggttttttttcgtttaggtttttcggatgtaggtttagttcgtcggtaacgggaggtgttttgagtgggtttgtgattgtcgagtatattcgtcgcggagcggaggttgttgttttttgaggttgagagtggattcggtttcgggtttttttaattggcggacgttggggggcggcgtggtaaggtagaacggagcggtattttagttttcgtttttttagggtttcgttttatattcgagagtcgttttttaattggtttgggaaatcgtattttagcgttttggtttagcgattttgaacgtgtttgcgtttgagatcgaagtgtagaagagggcgagcgtaggaggagaggtttggtgaattagcgatttttgattggttaggcgtgttttgagggcggggttagaattgcgtttttaattgatttcgtttttgtttagattatcgttttcgcgttgtttcgggtttatttcgtttgattcgttgcgttatgcgtttttttacgtttgtcggatgttaggcggcgatgtgttaggttttgaggggtcgcgagtttattttagacgtcggtttcgggaattttttgtttttttatttttttttttcgttattggttttttgtttatttatttttaggtgttatttttgggatatttagatgttttgatatttgatttgattttagttttagcgcgaggacgggagaagggttaagggtatgagattttggataggagaggtattggttattttgataaagagcgtggatttttaaagaaagggtttttagatatttcgtaggggagattgtcgagataggcgattttagttaattaatgttcgtacgcgaggagggttgtgtaggtaggtattacggttttttatagtttttttttttttttttttttgttcgtcgtagaatttaaatttttagagttgatcgagaagcgcgtgttgttgtagaagttattgaggggtagatttggaatgtgagtcgtggggcgaagggatagttttggagattcgtgatttcggaattcggtgggtatttaagtgatattggagtacgtagttttcggggatattaagttcgttttaggggtttataggaattttttgatttaacggtttttttggataggatgatttagaatagacggtgaagagataaaatagcgtgaaagggagcggcgatatttaaattgattttcggagggtagtatgattaagggaaggagttgttttcgtttcgtttaaattttcgcgtagtttttgtagtttatttttgtttcggaaggcggcgaggttttatttttattatttcggttttcgtcgtttttttcgcgttgaagttgcggagggtttttttttttagtttttaaattttttgttttgtggtttaagatttttaggtttaaatttataattgttagggttattattttttaaattttttttttatttgttttgttgatgacggatataggggttttatagatttagaagtatttggagttatttcgaaggatagaattgtggtaatatttttttttttttttttaatttttgagaatagtgtttgtatatggtacgggggtttttagtgttatatagaaggattcggagatgtttttatgggttgtaacggttttcggtgttatttagggatttttgttttttaaagaaatattatttttttttatttttttatttttgtgtttttatttcgttttgaattgttttttaaattgggttttttgggaaacgtttatttcgtgtttaatagtaaagtttcggtataaggcgagggcggtagggggtggggggcgggcgtttgttcgttttggtattaattttagagttgttgaacgtggataaaagagagggaatattttttttttttttatttttgtaaatatggatttatttattttttatttaagatgggtggtttttttgattttaagatattaagtagtttggcgaggtggttgatatttgggattttagaattttgggaagtcgaggcgggaagattttttaaggttaggagttttagattagtttggttaatatggcgaaaatttatttttattaaaaatataaaaattagtttggcgtggtggtgtttgtttataattttagttattagggtggttgagttaggagagtcgtttgaatttgggaggcggaggttgtaatgagtcgagatggttattgtattttagtttgggtgatagtgagattttgttttaaaaataataataataataataataaaaagatataaattggttgggttttaaaataaagtagttagaggtttagggtggtgatttatgtttgtaatttttttggaaggtagaggttagaggattttgagtataggagtttgagattagtttgggtaatatagggagatttatttttattaaaaaaaaaaaaaaaaaaaagtaaaaagttaagtatggtggtttatgtttgtggttttagttagttgtgaggttgaggtaggaggattgtttgagaataggagttagagattgtagtgagttatgattgtattattgtattttagtttgggtgatagagtgagattttatttttttttaaaaaattaaaaaataaagtagatttagtgtgaagatttaaggaaagaaagagaaagtaagataaaattttaaggagaggagaatcgaaattggttgattttattttggatataatggatatagttatttatgttacgtattagcgttaataaagtgtttttagaagtagttgttattaaattaatatatttattgaagtttttttttgtgttttgtgataggtattgcggatttagtagagattaaattaaagtttttgatttcggagagtatatattttatttaattgaatttatatattagttttatgaggaggtgttttttttgttttaggtaatgagtttgaattttaaataatgagtttaaaattatataggtatttagtggttgaattttttgtgtttatatttagtttttgttttatgattttaggttgggagttatggagttgaggaggtagtcggttgtagagaagtaatagattaataagtaatagtaaattattgaaaaaatatttatagaattgaaggaaaagttgaataggcggtttttggaaaggatagaagttaggatagttttagtatttaggtagtagatattaatggttagtgtttttattttggattaaaaagagagaattttaataggtttagggtgggttaggtgtttatatttatttgaggaaggggagggttttttgaggaatagtattatagattatttaatgttggaggataatggttttaacgtaaaaatgggattttgttattagataaatgggatatagatgttaggttgtaaaatttaataaatgtatacgtgtttaaatttcgattttattattaatagttatgtaattttttgattattaattagattaattgatatttttttttttttcgttattgtggtatatgtagtagttatttttattttttattttgtttttttataagattaataagtagttttttaaaataaagaaataaaagtaaaattgtttattgttttagtttatttattggtaaattagtaatattaaataaattttagatagagttattggagaagaattaagtataatttagtagaaataatatcgtatgtgtgaaggtgagtgtgtgtgtgtgtgtgtgtgtgtgtgtgtgtgtgtgtgtgatggaaaatattttgttttgtttaaattgtaagttatgattatgttttttttagtagaagtttatttttattttatttggaagtttataagaatatagtttaaaaaaaatttgtgattttggagtaaggttaagtttttgttattgtttttatattttgttttgttttatttatttatttattttttagttttttggagttttttttatttgtttgtgtttttgagatagggtttcgttttgttgtttaggttggagtgtagaggtattatttcggtttattgtaatttttgtttttcgggtttaagcgatttttttggtttagtttattgagtagttgggattattggtacgtattattatatttagttaatttttgtatttttagtagatattgaaatatatgtttgttatgttggttgggttggttttaaatttttggttttatgtgatttgtttgtttcggttttttaaagtgttgggattataggtatgagttattacgtttgtttagtttttagttttttgagatagagttttgtttagttatttaggttggaatgtagtggtatgattatagtttattgtagtttcgattttatggatttaagtaatttttttattttagtttttgggatagttgggattatagttatgtgttattatatttggttaatttttgtattttttggtaaacgaggttttattatgttgtttaggttggttttgaatttttgagtttaagtgattttttatttcggttttttaaagtgttggaattataggtatgagttattgttttagttgttttattaatttagttaaaaatatatgaaaagaggttttgcgcggtggtttacgtttgtaattttagtattttgggaggttgaggtgggcggattatttgcggttttggagtttaagattagtttgattaatatggagaaattttatttttattaaaaatataaaaaattagttaggtatggtggtatatatttgtaattttagttattcgagaggttgaggtaggagaattgttttaatttagaggaggttgtggtgagttaagattgcgttattgtattttagtttgggtaataagagcgaaattttgttttaaaaaaaaaagtatatatatatatatatatatatgaaaaggttgggtgcggtggtttacgtttgtaattttaatattttgggaggttgaggtaggtggattatttgaggttaggaatttgagattagtttggttaatatggtaaaatcgtgtttttattaaaaataaaaaaattagttaggtatggtggtaggcgtttgtaattttaattatttgggaggttgaggtaggtggattatttgaggttaggaatttgagattagtttggttaatatggtaaaattttgtttttattaaaaatataaaaattagttaggtatggtggtaggtgtttgtaattttaattatttgggaggttgaggtaggagaattgtttgaatttagggggtagaagttggtagtgagttaagattatattattttattttagtttgggtaaaagagtaagattttgttttaaaaaaaaaaaaaaaaaaaaaaaaaaaaatatatatatatatatatatatatatatatatatatatatatatatatatatatatatatatatatatatatatatatatataggtattagttaggcgtggtggtttatgtttgtaattttagtattttgggaggtcgaggcgggtagattataaaataggtagggtatggtggtttacgtttgtaattttagtattttgggaggttgaggtgggtagattatttgagtataggagttcgagattagtttgagtaatatggcgaaattttgtttttattaaaaatataaaaattagttgggtgtggtggtgtatgttagtaattttagttatttcggaggttgagaggtaggaggattgtttggggaggtagaggttgtagtgagtcgagatggtattattagattttagtttaggtgatagagggagattttgttttaaaaaaaaaaaaaaaaaagaaagaaaagaagaaaagaaaaataaattatttgttttatgaagaaatagtttgtaatagatataagatatagaatgtgtagtttttggtatggaataagtttttagaaaatgttagttttttttttgtttttgtgtgatatgaagggaattttagggttagtgttattttttggtggttttttttatttaagtgttgtgtattttattgtaaaagtatgttttttaggtttttgatattatattttatgttttttgtttttggggtttttataggattaagtgttattttttttatgaattagaaaagaattttttgaacgtttgttttgggattgatgatatagttgagttgaaaggataattagtttttttttttagattaatttaatttttaaggttggggatttatttgatgtttttatttaaatatttggagaaaattgtttttgagtattaggtttttttagtatattttttttaaatgttatatttttaggggttttgaatagtagaagagtttttaatattggtttagatggaagtatgtaggtatgtggagagttgttattttttgatttttgaaataaggtttaggatggaaaagagttttttggggaggttggttttgaatgtaaagttgggagaggtattttttgttaatttaagggtttgttggtaggggtaatatgttgatttggttttttttttattttgagatattattggtttttatgtagagttattttttttttttttttttttttttttttttttttttttttttttttttttttttttttttttttttttttttttttttttttttttttttttttttttttttttttttttttttttttttttttttgagacggagttttatttttgttgtttaggttagagtgtaacggtacgattttagtttattataattgttatttttttgggttaagtaattttcgtgttttagtttttcgagtagttgggattataggtatgtgttattatgtttagttaattttgtatttttagtagagatggggtttttttttgttggttaggttcgttttaaatttttaattttaggtgatttatttgttttggttttttaaagtgttgggattataggagtaagttgtcgtgtttggttttttattttttttttttttttttttttttttttttttttttttttttttttttttttttttttttttttttttttttttttttttttttttttttttttttttttttttttttttttttttttttttttttttttttttttttttttttttttttttttttgggtttcgttttattgtcgaggttggagtgtagtgagtggtacgattacggtttattgtagttttaattttttaggttttagcgatttttttattttagtttttttagtagttgggattgtaggtatgagttattgtgtttagtgtaatgtagggttttttatttaggattttaaagggtaaataaaaataggagaaaattatattttatttttattaatttttaattgaaatttagtattttttttaatgataaatgtaggtaataaatttatatcggtatttgtagtatatgtgattgttgttaatagaatttatatatttgtgttattttttagtagttgtagaaattttaaaatgttatgtatgtttacggttattttgtagttagtggtagtggttagatttattattagattttttttttatatattttgttttattttgataattgtattttaatatgattgtttttttttgtaattttatttattttattttatgtagttgaagattattttgatattttatagattttattagatttttaaaatttgttttagacgtaaaaagttaagaaattttaaatttttaatgatgttgttattttttgttttgtattattttataattagggtaattaggaatgtttttttttttttttttttttttttttttttttgagacggagttttgttttgttatttaggttggagtgtagtggtataattttggtttattgtaatttttgtttttcgggtttaagtgatttttttgttttagttttttaagtaggtgggattgtaggtatttattattatgtttagttatttttttgtatatttagtagagatggggttttattatgttggttaggttggttttgaatttttgatattaggtgatttatttattttagttttttaaagtgttgggattataggtatgagttatcgtgtttggtttgttttttttttgtttaaattaaaggtttttttgtaaaatttttgtttatattttttttattattatttaaatttaattatttatttatttgttaaatatttagaaaatattttttttgtataaaattatgttgtataaaattgttattatgcgaaaaataatttttattcgttatgttttttatttcgattttttaattttatttataatttggtagagttggattgtttatttatataggatatataggttgtagtttattatgggtagggagtggggatggttgttttaggtgtaggtaataagaaggtgtattgtttgtggagaatttaaaaataattttaaaattaattttttttttttttttttttttgagatggagtttgattttttggtttaggttggagtgtagtggtattattttggtttattgtagtttttgtttttcgggttttagtgatttttttgttttagttttttaggtagttggtattataggtatatattattacgttaggttaatttttgtgtttttagtagagacggggttttattacgttggttaggttggttttgaatttttgattttaggtgatttgtttattttatttttttaaagtgttaggattataggtgtgagttattgcgtttagtttgaagttaattttttattgatattgcgtattagtaattataaaaaaatgttagtgataaaatattttttgtagtgtagttttttttttttattttattttgtttggtatgttattgtatataggggagtttaattatttttagtttatatatatatatatagatatatatatatatatatatatatatatatatataaatatatagagtttttgagatttttttttttttttaatttttttagtttagtttttatgttattttatttagggtaggatttgtagtattgttgggttagtatttttaaaggtgagttttgtaagttttttggtttttggatggttttattaatagtttaggatgagttttgtaattttggtatttgtaggtaggttttagtttttttttatatttttgggtttgaattttttggtaattgcgtttgatagtatatgatttttattttttatttttagattttttattttttaagaaaatattggattttttggttaagttaaggtttaatgaattggtttggtagtttttttggtttttaagttttttttttttgttttattttttgaagatttttagtagttttatttggaagtgttattgtttttatttttatttttgagttttttgtagtttttttttttgtggttttacggatttatttagagtttgtagggagttgatattttatttgagttgttagaattgaggtgagaaaggaggtttttaagtgtagaaatgtgtttttttttttttagttattattgaaggttttggatgtgattgagttagattttttttgtatagtttttttttggattattttaagataaattaatttgtgattttaattatattcgcgaagtttttttttagttgtatttaagttaaagtgtgattgaatgaatgaaagagggtgtgttggcgattagttagggaagtgattttaagggtttttagattttatattattaattgtaaaatgtgacgtttttacgttttgataagcgaattttttttttaaatttattgtttgagttgatgtaaatgaatttagttacgttttttgggtttggtatttgagaagtgtttgtgatttgggaagagtggttagaatggcgataatgggaagagattatattttagttggtggagagtgaaaggatagttaatattttgttttttttgaagtatatatatattggagattgaaagtgtttgttggttttataggtattgaggaaagttttttatttttttagatttttttttttttttttgaggttttttgaatttaatagtttgtaattttattttatgtttgggttaataaattattttttaaggaggatttgaatataataattcgttttttttgtatttttttagaatatagagtttatattatttatgagtttgttaaataaaatattttttattggttttaatgttgagtattgaaagttttttgagtttatttagtattaatttattatttttaaaatttataggatgggtcgggtgtagtgatttatgtttgtgattataatattttgggaggttaaggggtagattttttgagtttaggagtttaagattagtttgggaaatatggtgagatattttttttataaaaaaaaatttttttttttgagacggaattttattttgtcgtttaggttggagtgtagtggtgtaatttcggttcgttgtaattttcgtttttagggtttaagcgattttttgttttagttttcgagtagttgggattgtaggtatttattattatgtttagttaatttttgtatttttagtagagatagggttttattacgttggttaggttggtttcgaatttttgatttcgtgatttattcgttttagttttttaaagtgttgggattataggtgtgagttattatgttcggtttataaaaatttttttaaaaaaattagttaggaatggtggtgtatatttgtggttttagttatttgggaagttgagataggaggattttttgagtttaggaggttgaggttgtatagtgagttgtgattacgttattgtattttagtttgagtaatagtgagattttattttagaaaataaataaaataattaaaaatatttataggatgaaatatatgtttgattatgataatttgtttatggtattttttggatggtttagtttttttgtagatttttagattaatagtttttgttgtagtgatagtttttttttgtaatttttttttttttttttttgagatggaattttatttttgttgtttaggttggagtgtaatgatatgatttcggtttattgtagtttttgtttttagggtttaagcgattttgttgttttagttttttgagtagttggaattataggtatgtattattatgttcggttaatgtttgtatttttaatagggacggtgttttgttatgttggttaggttggtttcgaatttttggttttaggtgatttatttgttttagttttttaaagtgtttggattataggcgtgagttattgtatttggtttatagtttttaattttatttttatttaaaagttttaatggaaggtttatagattttttttttaagtaatagtaaagcgtattttttttaagatttttttgattatttttataaagtttgattttgaagttttttgaggattttttttggaggtaaattagatatatagatatttgtatttttgttttttttaatatgaaattatttttattttattttttttttattttttttgtttttaggattagtgggtttggggggttttttttgtagaaattttgtatttttagtattgatattttgtatatttgtaggagagttagatgttttattattagaaaagttatatttggttgggtatgtagtaatgaaatttttagtggttttgggaaattacgtttttttgtttagattttatttattgtgggagttagttggttgttgttttaaataattcgtttgttattgagatttttttgtttgttgtagtttttagtgtttttatataatttatgtatttataattgtttattaagttattattattatttattttatgttttttatttagttaggggtagggtttaggtaattaaagaggttgttttgttgggtttgtaaggttttattaagtgtgtttgaggtgatagtttaagtattgttataaatatttgcgtattgttgtaaatatttgtattagttttttttcgtattgttataaagaaatatttgaaattgggtaatttataaagaaaagaggttgtcgggcgcggtggtttatgtttgtagttttagtattttgggtggttgaggtaggtggattatttgaggttaggagtttgagattagtttggttaatatggtgaaatttcgtttttattaagaatataaaaattagtcgggtatggtggttagtatttgtaattttagttatttgggaggttgaagtaggagaattatttgattcggggaggtagaggttgtagtgagttaagattatgttattgtattttagtttgggtgatagagtaagatttcgtttcggaaaaaaagaaaagaaaagatgtttgttgggtatagtggtttatgtttgtaattttagtagtattttgggaggttgaggtcggagggttaattatttgagtttaagagtttgagattagtttgggtaatatggtaaaaattcgtttttataaaaaatttaaaatttagttgggtatggtggtatgtgtttgtggttttagttatttggggagttgaggtgggagaattgttttagattagaaggtagaggttatagtgagttgtgattgcgttattgtttgggcgatagagtaagattttattttaaaaaaaaaaagaggtttaattggtttatggttttgtgggttttataggaagtatgatgttggtatttgtttgttttttggggaggtttttagaaatttataattatggtagaaggtaaaggaggagcgagtttttttatatggtaggagtcgagagagagggaggaggtgcggtatatttttaaataattagagtttgttagaattttttattatgagaatagtattaggaggatggtgttaaattattcgtgagaatttatttttataatttaattattttttattaggttttatttttaatattgggattatatgagatttggtggggatatagatttaaattatattaatatttaatatattgtatttttgaattgttatagtaattttgtgaggtgggtattagtgttatttttattttatagagaggaaattgatgtttagagattttgttaaggttatagataggatagttagtgtatgataaagttggaattggaatgtagttagttttgttttagaagttatttttttgtttgtttttttttttttatttttttatttttttttttttttttttttttttttttttttttttttttttttttttttttttttttttttttttttttttttttttgagatagggtttggttttgttgtttaggttggagtgtggtggtattattttggtttattgtaatttttattttttgggtttaagttatttttttatttaagttttttaagtagttgggattataggtgtatattattatatttggttaatgtttgtattttttttagtagagatggggttttattatgtttgttaggttggttttgtatttttggttttttaaagtgttgggattagaggcgtgagttattgtatttcgtttgaagttatattttttttttttttttttttttaatgagacgagttttgttttgttttttaggttggagtggtgtagtggcgtgattttggtttattggaattttcgtttttcgggtttaagtaatttttttgttttagtttttcgagtagttgggattataggtatttgttattatttttggttgttttttttatttttaatagagacggggttttattatattggttatgttggttttaaatttttgattttaagcgattcgtttgttttggttttttaaagtgttgggatataggtataagttatcgtgtttggttaaggttatatttttaaacgttattttttatagtttttaagaaattaattgggtgaaatttagtttgttttttgtttttgtttttattattttatagtgaaaatataaatttttaagtttatttattttattgtattgtgtttttatgatattttgtattttttggttttgatttagttttttattttttttttttttaatttgtttgtgttttttaataaattgtagttttttttatatttttagtttttttttggagtattttttttattttttggcgttaagtgaaatttaatttttttttgagggtattattttttttgtaggtttttgaaatgagagttgttgatttttttatagttgagggtgtttttttggttttagattgttgttttcggattattttttttttagtttttaattttagtttaaaataattcgcggttttttaggtattgtaattaggttaaattttttttttttttttttattgttattgtttgttagatttttttattttatttaggggaacgttggtttagttgatcgtttgtttttgtattgagttttttttttgggagattttattgtttatttggaggatttattttttatttgattttttaataatttggttatttaatttttaagaatttttttttttttaattcggttatatatttttattgttatattttggattttattatttgaaagagtttttttttgagaattagttaagtagtttgtttttggtttttattttttaatcgtttgtttattagtttgtttgtttttttcgtaattaatttttagttttttaggatttttggattaatgatgtttttcgttttttagtttatgagtttttttttatttagtttaattttataattttttattttaatatttttttggataatgtcgttaatttttttttttttttgtatttttattttttgtatttaagtggtaaaattttaattttggatgagtttagtgatttgttttttttaggattttattttgatagttaagaattgttggtggtggtgggggaaattatataattaggaaatggtttttattttttatttatgattatgaattttaaggaggtttttagaattgtttagtggtttaattatattattttggttaatggttacgttaaatttttttgatttttgaatttttgaggtttttttgttttttattttatgtttatttgatgattttttttttatgttatagagaaaatgaaagttattagaggtgagtttttttaattatttgttattagatttatatttttttaagaggaatataatgtatgtagcgtatgtattttgatttgattttgatttgaaatatatgtataggttggatgtagtggtttacgtttgtaattttagtattttgtttgagtttaggagtttaaggtaggtggattatttaagtttaggagtttaagatttatttgggtaatagagaaaaattttgtttttataaaaaaaaaaaaatataaaaattagttaggtgtggtgggttatatttaaatagtagttttagttatttaggaggttgaggtgggaggattatttgagtttgggaggtggaggttgtagtgagttgtgattgtattgttgtattttagtttgggtgatagtgagatttagttaaaaaagaaagaaggaaaggaaggaaggaaagggaggagagagagaaaggaaggaaggaaggaaggaaaaatagaagaaaggaaggaaagaaattaaaaagaaagatatatatatatataaatatatatataaaagatattttgaggttaattggggaatatttgagtatattttgttattagatgaagtgaagaaatgatcgttattttttaattttgtttttttttttgagattgagttttgttttgttattaggttggaggttagtggcgtaattttagtttattgtaatttgtttttattgggtttaagtaatttttttgttttagttttttaagtagttgggattataggtatgtattattacgttcggttaatttttgtatttttagtagagacggggttttattatattggttaggatggttttaatttgttgattttgtgatttttttgttttagttttttaaaatgttgggattataggtgtgagttatcgtgtttggttatgattattatttttttagttgtgattacgtattgtggttatggaatttttttatttttgggagatgtatgttgaggtatttaggtgtgaagtatatgtttttttatatttttatatggtttaagaatgttttagtagttatttaataatttttatgtttaaaaaaaaaaaaaagggttgggtatagtggtttatgttcgtaattaattcgagtattttgggaggttgaggtaggcggattatttgaggtcggaagtttaagattagtttgattaatatggagaaattttatttatagtaaaaatataaaattagtttggcgtggtggcgtatgtttgtaattatagttattcgggagtttgaggtaggagaattgtttgaatttagtaggcggaggttgcgtatagtcgagatcgcgttattgtattttagtttgggtaataagagcgaaattttattttaaaataaaaaattaaaaataagtttataaagacgtatataggttttggtattgtggtttatgtttgtaattttagaattttgggaggttaaagtaagaggattatttgagtttagtttgagattagttgggtaataaggcgatattttgtttttataaaaaatttaaaaattagtcgggtatggtgttatgtatttgtggttttagttatttgagaggttgaggtgggaggatcgtttgagtttaaaagtttgaagttgagatgagttatgattaggttattgtattttattttgtgcgatgaagtgagattttgttttggaaaaaaaaaaaaagaattatatatatatgtgtgtgtatatatatatgtttgtatatatataatatataaatatttgtatatatgtataaataataattgttaaatttaagtaaaatgatcgatatataaataatattgtattatatttttaagttttttgtatgtttgaaattttttataataaaaaaattgggtaaaatttttttatttttatttattgttcgatttttttaggttggtgtttatttttattttgttgttatttaaatgtttttttgtaatgaattttatgttattaagtttattgtttcgttttttttttatttgaattgttattagtagttgacgttgttggttagtttttttttgaaatattgtcgttttttggtttttaggatttggttttttttggtttttttttatttttttatcggttgtttttttattttttagtcggtttatttcgtttttgattgaaattatttggttatattggagtttattaagagaggtcggttttggatttttttttttttatgttattttttttttttaggggattatatttgttttgtggttttagtttttattagttggttatttttaaatttattttttgttttaaatttttagatttgattatttttttgtttggtatttttatttggatgttttaaaggtattattaatttagtttttttttttttttttttgggagatagagtttcgtttttgttggttaggttggggtgtagtggtaagattttggtttattgtaattttcgttttttgggtttaagtgatttttttattttagttttcggagtagttgggattataggtattcgttacgatattcggtaaattttttgtatttttagtagagatggggttttattatgttggttaggttggttttaaatttttgattttaggtgatttatttgttttagttttttaaagtgttgggattataggtatgagttacggtgtttagtttaatttagtatatttgaaatagaagttatgatttttttatagaagtagtattatttttagatttgaattataggggttttgttttggtttatatattttagggggatttatttattataaataatttattatatatatttattatatgatatttgggtatttttgttattgatttgttgttagtgttggaatagtataatttgaaattttatatatttgtttttgtaattaacgtcgtttaagttttggggaatggtgatttttgtaattttttgttttgtattttggaaataaaagatgattatagttaattttgtgaaaatttgaggttgtgtttttgtttggattttgaagtatgtattgttttggagtgtagggaggatttaagtagtggaaatatgtaagtgaaattattttaattagtttgttaaatattattttttaaatagtatgataaagtattattttttaatagtgttgagtgtggttttttttgtttttttttgttttagaggtatggatgtatgttgtgttgtatttataatagttgtaaaggatagttgaggaatatgttgttgtattaaataatttttattattgttaaatttatatgtatgtggtgggaggggtggtgagggataaaaaattatatatttatagtgtatattttttttgtgatgggggtattaaaattttagaaattattattaaataatttatttatgtaattgaatattatttgttttttaaaagtttattgaaaaaaaaattgaatatatgtaggtttagatataatttttgtgaagtatgatattgattttttatgttgtaatagatggatattgaatacgagattatgaatataattatttttagtatttattagggattgattttaaaatttttattgatgtttaaattttttgtataatatggtatagtatttgtatataatttatgtatatttttttatatattttaaattatttttaggttatttatggtgtttatcgtaatgtaaatgttgtataaatatatgttatattgtattttttatttgtattatttttttttttttttttttttttttttttttttttttttttttttttttttttttttttttttttttttttttttttttgatagttttgttgtgttatttaggttggagtgttatggtaggatattagtttattgtaaattttgttttttaggtttacgttatttttttattttagttttttaagtagttgggattataggtgttcgttattatgttcggttaatttttttgtatttttagtagagatggggttttatcgcgttagttaggatggttttgattttttgattttgtgatttattcgttttgattttttaaagtgttgggattataggcgtgagttatcgcgttcggattggttatatatattttaaaaatatttttattttttagttggttgaatttataggtgtggatttatagatataaaatgttaattgtagtttaatttttataaaattatttgttttagtttatttagattgttataataaaatattttatattgagtaatttataaataataaatattgtttatagttttggaggttagaatgtttaagtaggtggtgttagtagatttggtagttagtgagggtatattttgttttatagatggcgtttttttgttgtatttttacgggtggaaggggtaaataagtttttttgggttttttttttttaagatagggtttcgttgtgttatttaggttagagtgtagtggcgtgatttcggtttattgtaagttttgtttttagggtttaagtgatttttttgttttagttttttgaatagttgggattataaatgtttgttattatgattggttaatttttgtgtttttagtagagatggggtttttttatgttgattaggtttgttttgaattatcgattttaaatgattagttcgtttgagttttttaaagtgttaggattataggtatgagttatcgtatttagtttgggttttttttataacggtattaattttatttatgaggataggttttttatgatttaattattttttaaaggttttattttttaatattattatattggggattaggttttaatttatgaattttaggggggtataaatatttatgttatagtaatatataataaaaattaataaatatgtatatatttttttgagatagggttttattttgttattaggttggagtgtagtggtataattatggtttattatagttttaattttttaggtttaggtaatttttttattttagtttttagagtagttgaggttatatatgtgtgttattatgttcggttaagttttttattttttgtagagatggtattttattatgttgtttaggggggttttaaaatattgggtttaagtagtttgtttattttgattttttaaaatattgggattttaggtgtgagttattgggtttagtttaaaattttaaaaaaaagtaggtaaaaagttagttttatttaaatgtgtttgatttaaaatattgatgtgtatttattattatttatattttgtttagatgtcgtgttttatggttgagattttagtattttgggaggttgaggtgggaggattattcgagtttagaaatttgagattagtttggataatatagtgagattatttttttataaaaattaaaaaaattagttgggtgcgatggtttatgtttgtaattttagtattttgggaggttaaggcgggtggattatttgaggttaggagttcgagattagtttggttaatatggttaaattttacgtttattaaaaatataaaaaattagtagaagaatgtttgaatttatatgtatatatgtatatatatatatgtgtatgtgtatgtttatatatatatgtatatgatataaaattagttaggtgtggtagtatatatttgtagttttagttatttgggaggttgagatgggaggattatttggatttgggaggttaaagttgtagtgaattgggattatggtattgtattttagtttgggtgataacgtgagattttgttaaaaaaaaaaaggaaaaataaaaagagtgattttatagaaaaattgagatttttaatttattacggtagtgttagttttgaatttttatgcggtaacgttggattaggagttgttgtttttttaggaggggagggtgttttttagtttgttatagtttttttttggtatttggtatattatttgtttggtttttataggaatttgaggtgtaaattgatttagattattgaaggaagagtttgggtttttttagttttggggtattttcgttgttaagtaaggtttttatgagatttttagaagttgagattaaaaaagagtttatatgtagttggaggtgatatttaataataattataataatagtattaataataaaaatagtagtttagagtagttattttaagttaggtaagtgttttaaagtattttatataatttatttatttttacgataatgttattaggtagtattttgaatatatatattttgtaggtgaggaaattggggtatgtagttgttaagatttatattagtcgggcgtggttatttatgtttgtttttagtattttgggaggttaaagcgggcggattacgaggttaggagtttgagattagtttgattaatatggtgaaatttcgtttttattaaaaatataaaaattagttggatatggtggcggttgtttgtgattttagttatttaggaggttgaggtaggagaatcgttttaatttgggaggcggaggttgtagtgagttgagattatgttattgcgttttagtttgagtgatagtgagattttgttttaaaaaaaaaaaaaaaaaaaagatttatattaatttatatcgtttaataggaggcgtgagatttaatatagggtggaggagagaataggttaggaaattatatttttttatttgtatagttattattattgtatttttttaaagagattggtaataatttttatttagtattgttttattgattggtttattttatgattatagtaatttagttaagtaaatttttatttttgtatcgtttgttttgtattatttttttttaaaattaaaaataaaaaaaatggattataaattcggttaacgtttattttatttttttttttttttgtagtaattattattttaaagttgttgggaattatttttatgcgtattttgtatttttaaaaaatgtttgtttttttaaatatatattattgttttgtgtattttaaaatttatataaataatattatataatatttatttttgtaagttttttatttattatattgttaaatatgtttataatttatttaattgttgtatagtattttattataagaataaattatattttatttatttattttatttaataatagttagtttatttttatttttttttgataattaattgatattgtaatgattatttttattttcgtttttttgtgtatgtgtagaaatgtttttttaaggaatagatttagaagtaagattgttgggttatagggaatatttatttttagtattaattggtgttaaaattttttttaaatttgttgtatttgtttatattttaatataaaatatatgtatttttattgttttatatttttgttaatagtgttagaataattttaattttggtgattttgtgggtgtaaaatggtaattcgcgttgtgatttgtatttttatattattggttaaattgagtatttttttttatgtttattgattattaggttttttttttgtgatttatttatttatagtttttgtttatatttttttgcgttgttttttttatatggatttgtaatttttttatgaattttggatataattttttgttgtttatgtagattgtgaatattttttaagtttgtggtttgttttttattttacgtgattttttttttttttttttttgagacggaattttgttttgtcgtttaggttggagtgtagtggtataatttcggttcgttgtaagtttcgttttatgggtttacgttatttttttatttaagtttttcgagtagttgggattataggtatttattattacgtttagttaatttttttgtatttttggtagagacggggttttattatgttggttaggatggttttaattttttgattttgtgatttattcgttttggttttttaaagtgttgggattataggtttgagttatcgcgttcggtttatgtgattttttataaaagtttaaaaatgttttaacgtggttatatgtattaatatttttttttattgtttgtgtatttatttatagtcgataaataaaaattgtatttatggtgtaataatatgatgtgtgtatatatatgtgtgtgtgtgtgtgtgtaatggttagagtaattattgtatttgttattttatatattattattttaaacgtgatatttgaaatgtatttttttagtaattatttttatttttattttttttttgagataggattttgttttgtcgtttaggttagagtgtagtggtaagattatagtttattgtagtttggattttttaggtttaagtgattttttttttttagttttttaagtagttgggattattggtacgtgttattatattttgttaatttttttaattttttgtagagatagggttttattatgttatttaggttagttttgaatttttggggttaagtaattaagtaatcggtatttcgaaatgttaggattataggtatgagttattgcgtttagttaatttttttattttttttagagatggggttttattatgttgtttaagttggtgtcgaattggttttaagcgatttatttattttagttttttaaagtgttgggtttatagatataagttattgtagttggttagtaatttttaagtatataatatattgttattaattttagttattatgttatataatagattttttgaatttattttatttaattgaaattttgtattttttgattaaagttttttaatttttgtttatattcgtttttcgttttttagtttttgtgtagttattattttattttttgtttttgtaattttattttatttatttatttttttaaatttattttgagatagggttttattttgttgtttgggttggagtttagaggtttgattatagtttattgtagttttaaatttttggatttaagagatttttttgttttagtttttcgagtagttgggattataggtacgtgttattatgtttggttgagtttgattttttaggttttatatgtaaatgaaattatggtatttgtttttttgtgtttggtttattttatttagtataatattttttagttttatttatgttgttatagatgatagaatttttttttttttaaagattgaatagtattttattgtgtatatgttttataatttttttatttatttattgatggatatttaggttgtttttatgttttggttattgtgaataatggtgtagtgaatttgggaatatagatatttttttaatatattgagtttatttttttcgaaatatatttgataatggaattattggattatatggtagttttaattttttgaggaagttttattttgttttttaaaataggtgtataaatttatatttttattaatagtttgtgagggtttttttttttttatatttttgttattatttgtaattttttggtttatttttattttttttattagagttattttagtaggtatgaggtgatattttattgtggtttaaatgtttatttttttgataattagtaatattgagtatttgttttttatatatttgttggttatttatgtgtttttttttgagaaatgtttttttagattatttgtttattgtaaaattagatttttggttggatgtagtggtttatgtttgtaattttagtattttgggaggttaaggtaggaggattatttgagtttaggagtttaagataaatttgggtaatatagggaaattttgtttttataaaaaaattttaaaaattagtagggtacggtggggtgtgtttgtggttttagttatttgggaagttgaggtgggaggattgtttgagtttgggagttgaaggttgtagtgagttattattgcggtattgtattttagtttgagtaatagggtgagattttaatttaaagaaaaaaaattagatttttggtttttaataatttttgttattaagttttttataaaaatatttattttttattagatgtatagtttataaatattttgttttttttcgtaggttgtttgttgattgttttttttgttgtttagaagtttttatttgatgtaattttatttgtttaaaaaaattattgtttagattaatgttaagaagttaagattatgttattgtattttagtttagtaatagagcgagattttattttaaaaaaaagatttgaaattgtaaaaatattagaagaaaatataggagaaaagtaatttttttgttttagttttttgagtggttgggattataggtgtgtattattatatttagttgatttttgtatttttagtagagatggggttttattatgttggttaggatggttttaattttttgattttatgatttatttgttttggttttttaaagtgttgggattataggtgtaagttatcgtatttcgttattttagattttatgtttaagtttttaatttattttgagtagtttttttttttttttttttttttggaggtagtttttttttgttttttaggttggagtgtagtggtgtggttttggtaatttttgttttttagatttaagtaatttttgtgttttagttttttgagtagttgggattataggtgtgtgttattatttttggttaatttttgtgtttttggtaggttttattatgttggttaggttggtttcgaatttttggttttaagtaatttattggttttagttttttaaagtgttgggattatagatgtgagttattatgtttggtttgagttgatttttgtatatgaggtgagatatggttaaattttatttttttatatgtggatatttagtttttttaggattgtttattgaggagattgttttttttttattgtatgtttttggtatatttgtaaaggattagttggttataaaatgtgtggatttatttttggtttttattttggttttatatgtttgtttttgttttagaattatgttgtttttattattatagttttgtggtagtttttgaaattaggtagtgtgatggttttagttttgttttttttgtttaagattgttttggttattttggtttttgttttttgtggttttatatgaattttaggattttttttttatttttgtgaaaatgttattggaattttgatagaggttggatggaatttatagtttggggtagtgtggatattttaataatattaatttttttaatttattaatatggaatatttttttatttatttgtgtttttaatttttttttttaatgttttatggtttttagtgtatagattttttatttttttgattaaatttatttttaagtatatatttttgatgttattataaatgtgattgtttttttgattttttttttggttggtgtattattagtatatagtaatgttattgatttttgaatattgattttgtattttgtaattttattgaatttattagttttaatagtttttttggtggtatttttagggatttttttatataagattatgttatttataaagtgataatttaatttttttttttttaatttggatgtttagggagtattagtggtttaagttagttgttttggtgtatagggaggcgaggttatgagttcgaggttaatttggttaatattgattaatttggatgttttgtattttttttttttgtttatttgttttgattagaatttttagtattatattgaatagaaatggtgagaatggttatttttgttttgtttttgattttagaggaaaattttttaattttttatgattatgtatgatgttagttgtgggtttgttatatatgggttttattgtgttgagatatattttttttatatttaatttgttaagaatttgtattatgaaaggatgttaaattttgttaaacgttttttttttatttattgatataattatatagtgttttttattttgttaattgtttgtatttttgtatttttaaaattttgtataagaaatttttttttattttgatattattaatatgtgattttatattttttttgaatagtttttagttttgttttttattttagttatttgaaatttatttttgggtaggatgtaatgtagaatttattttttgtgtgtttgtttggatagttagttaatttaaaattattgaatttttttattgatttatgttatttttattatagttaagttttatatttttgagggtttgtattagtttatttttgtattgttatagataaatatttgaaattaggtaatttataaagtttaattggtttatagttttataggttgtataggaagtatggttggggaggttttaggaaatttataattatggtggaaggtgaaagggaagtaggtatgttttacgtggttggagtaggaggaagagagggaagaggtgttatacgttttttttttttttttttgagatagagttttgttttgttatttaggttggaatgtagtggtataattttagtttattgtaatttttattttttgggtttaagcgatttttttattttagttttttgagtagttgggattataggtatgtattattatgttcggttattatttttgtatttttgtagagatgatgttttagtatgttgtttaggttggttttgattttttgagtttaagtgatttttttgttttagttttttaaagtgttgggattataggtaagagttattgtatttggtttttatatatttttaaataatcgggttttatgataatttattattatgagaattgtatttagtgggaaatttatttttatgatttaattattttttattagattttatttttaataaaggggattataattcgatatgagatttggagagggagggatatagatttaaattttattaggatttgatttaaaaaagttttgttttgtattgtggtttatttatgtgtgtatatattaggattagattgttttaattattttaagttttaattagtaaatttgtgatatatggttaggtaagggattttatatttttttgttttaagttttgtttttttttggttatttatttttttataagaattttaaggtcgggtgtggtggtttatgtttataattttagtatttgaggaggtcgaggcgggtagattacgaggttaggaatttaagattagtttgattaatatggtgaaatttcgtttgtattaaaaatataaaaaaattagtcgggcgtggtggtgcgtatttgtagttttagttatttaggaggttgagttaggagaattatttgaatttgggaggtggagtttgtagtgagtcgagatcgcgttattgtattttagtttcggtaatagagtgagatttcgttttaaaaaaaaaaagaattttaagaatagtttgttaagttttataaaatatttgattggagttttgtttagaattgtattgaatttttagatttgagaaaaattattagttttatattaaattttcgtttttgtgagtaggggatttttttttatttttttatattttttttatgttttttaataaaattttataattttttttataaatattatatatagattttgttatatttatttttaagtattttatgatttttgttatgataaatggtatttttttttttttttttttttttttgagacggagtttcgttttgtcgtttaggttggagtgtagtggcgtaatttcggtttattgtaagtttcgtttattgagtttacgttattttttttttttaatttttttagttgttgggattataggtgtttgttaattcgtttagttaattttttgtatttttagtagagacggggttttattgtattagttaggacggtttcgatttgttgattttatgattcgtttgttttggttttcggaagagttgggattataggcgtgagttacgatgtttggtttaaaatgaaattttttatttgtttattgttgtggtgtaaggatattgatgtttgtgtattttttttgttttcggtaaggaaattgttatttttaatagttggtaggtttttgtgaattttttttgtatagtaagtaatttatgtatagtaattgtttatgtatagtgatggttttattttttttttttttttttgtgttattttagattttttggtagaaaggtgaatagaaatagtaaaaattggtatttttgttttgattttggaagttattttttatttttagttagttagattaaaaagattaaaaaagaaatagataggtttttattatatagtggttatttatagttttaattatagagtattatagttttaaatttttaggtttaacgaattttattattttagttttttaagtagttgggattataggtataagttattatatttggttaatttttaaatattttgtagtttattatagtattatttataatagtaaagatatggcgttaatttaaatgtttattaatgaaagattagataaagaaaatgtagtatgtagttaggcgtggtggtttatatttgtaattttagtatttaggaagtttgaggtaggtggattaggagttcgagattagtttgatcgatatagtgaaattttgtttttattaaaaatataaaaaaattagttaggtgtggtggtaaatgtttgtaattttagttatttaggaggttgaggtaggagaattttttgaattcgggaggtagaggttgtagtgagttgagattgtgttaatgcgttttagtttgggtgatagagtgagattttattttaaaaaaaaaaaaaaaaaaaaaaaaatgtcgggtacgatggtttatatttgtaattttagaattttgggaggtcgaggtgggtagattataaggttagaagtttacgattagtttggttaatatggtgaaattttgtttttattaaaaatataaaaattaatagggtgtggtggtattcgtttatagttttagttatttgggaggttgaggtagaagaatcgtttgaatttaggaggtagaggttgtagtgagtcgagattgtgttattgttttttagtttgggtgatagagtaagatattattttaaaaaaaagaaaaaagaaaatgtagtatgcgtatattatggaatattatgtagttataaaagggaatgagattatgttttttatagggatgtggatggaattggaagttattatttttagtaaattaatataggaatagaaaattaaatattatatgtttttatttataagtgggagttgaacgatgaaaatatttggatatatgtgggtggggggaataataatttattgaagtttgttagaaggggaagtggtaggagggagagtattaggaagaatagttaatggatatcgggtttaatatttaggtgatgggttgataggtgtagtaaattattatagtatatgtttatttatgtaataaatttgtatattttgtatttgtatttcggaatttaaaataaaagttgaaaaaatattttgtagagacgaagttttattatgttgtttaggttggttttgaatttttgagtttaagtaatttttttgttttggttttttaaaattttgggattttagtagtgagttattgtatttggtttttagttttggattttgggttttgcgatattattttatgttggtttttgaagttaatgaggtaaaattagaaaggggaattaaaaagttaaagagggagagggttttataggtaagatggaggaagtttgggatgaaggtagggttgtggatttgaatgatgttaggaattaaggaggaagtaatagtgttaggtaatagtatatgggatttttgggttgtagttataggagggagaattatggttttaatttattatttttgaaattttgaaatatttagttttttgtttagattttgttatgaatgtatttatttaattattatttataaagtatttagtgttaggtttagggagtggtaagagtgagtatttgtagttatagtttttgtttttagggagtttatatttaatggggtagatagatattagtttgtatataattattaataaatgtagaattttaatagggttaagtgtttttgaggaaaggtatattttagtgtgagcgtttataataggagaatttgattttgaaaagaaggttaggaaggtttttttgaggttattgagaaggtgaggtttgaagaatgaagaggagttaagaggagaggaatagaggaaggagtcgttttatagagggtttagtttttttggagattttgtgtaggaggaagtataaggtggatagtaattggagtatacgagtgagggggtgtggtgggagatgaggttggagaggaggggttattttttgtagggttttagaggttaggttaaggatttgggtttttaatttaagattaatggaaaattattgaataggtttaaggaggttgattgaaataattagatttgtatttttaaaggattttttttaggtgtgtgttatattgtagagaaggttatttttagtttttttagttattgtaatgatttagagaaggttatatggtttatatggtggttagtttagggatgtggagggatgaaaacgagtggatagatttgagatatattagagtagataaaatggataggattaggtgttggatttaatattgagatgtttattttaaatcgtttttatattaaatttttcgaaggtaggggttatgttatatgattatgatatttaggttttagaataatttttgatatatggtagatttaatatatatttttcgaaagggtggaaatgattagtagttttttaagtaattttttgattattaagcgtatttaattttttttagtatgtgttagtaattaatttttttggtatattatagggagaaatattgtcgagttttaaagagtatattttggggtaagttaatataagaataaggttttatttattttataatatgaagagtaatagtaaattcgtaagaataggatttggtgaagtaaggagtaggtataggaagatggtttattaaataggggcgtcgggtgtagtgtgaatatttgaggtaggaagaatttagtagtttttgggggttgggtgggattagttgggggattaggatttgatggtagggggttgttttggagatttttggaaattaagttatttattttttttttgtttttatttttataaaagaatttttaagggtatttttttttttgtttgttttgttttgagatagaggtttattttgtcgtttaggttggagtgtagtggcgtgatttcggttattgtaaatttcgttttttaggtttaagtgatttttatgttttaattttttgagtagttgggattataggtatgggttattacgttttgttaatttttgtgttttttgtatagttagggttttgttaggtttggttaggttggttttgaatttttggttttaagtaatttatttattttggttttttatagtgttggaattatagttatgagttattatgtttagtttaagttattattttaaaatgattttttaagaaagttttaaggagtttaatttatttacgataatagtacgtttgagatagtttagtgaaattttttcgatggaggataggagatggaaaagtgttttaggattttttatttatataaaaaataaaattttttaagattttgagaagtatggatttttttttagagaaaagtttttggtttgggagtttttttaggatttggtattttggtttagagtgaagtggatttggttattttagttttgagtgggtttaggcgagatattcgagttattttttatggttgttttgaaggttattttggttgggagtgggtggatttttgttttgttatgttttttataggtggaggaagtttgtttttgaggttgttttgttatttttatagagcgttgtagattgggggcggtgatgtagttataggggttttgattttttgtttttttattgtgtttattttatttttttttatatatgaggtttggtgttatggtaggtgggtgttttaagtgaaattatagttatagaggtaagtagtagagtttgtttttgatgtggttttggtgatgttgtattagtttggggttgtattagaaattatgtttgtagtttttgtttttgtagatttgttggtgttgtattagttttgagtaatgtttatagtttttgttttattggttattgtgatggggacgtttttaggtatggttttgttgttggtgttgtaggttggagtgggggttagtatttttatttattataagaaggtttaggtggtatagacgtaaggttgtttgtttgtgtgtagagtggtaggttgtaacgggttggagttttggggagaggtttttgttatattggtggtagtgattgggtttaggtaggtgtgtgtcgtagtgttgggttaggtgtgagttgtggtaagagttgtggttatattttttgtaggagtagggtttattatttgtgtgaaagtgttcgtatagggttaggtgggttttttggttgaagtattttttatattagggggaggagaagggttttttgtttaggttgtgttgagagaggtgagagtagtgggaagagattttatattttaggtaggaaatttgagtggatttgtgggtggagatgggggtttcgggtaggggagttggggaagggttggttgtgatagttggtaggtaaaggagtgttatagtaggtagagggttgggtttgttttttttttttttttttttttttttttgtttttagtttgtagggagaggggagagaggtgagagtagtatgggggaggaggaagtagaggagatagaggtgggagaggagaggttaagttttatatttaattgaagaagtggttggcggttttagcggtattttttttttcgttgaggtggattgtgaaggtggagaagtttagagtatagttttttgtgagtagttttttagggtgttgagggttgttaggtaaggatagggtttttagagttaggttttgtttgggtaggggttttttgggggaatttttttttagggttttgaggttttgggttttagagtttagttttcgcgtttagatatatggtttgttttgttttggagattgagaagtttgagaggtaaaatcgtgttgggtggtaggtagggtaagggagagggagtttttttttattttttttatttattgtagaaaggtttttttgtttttttttttagtttagttttattttttttgtgaggtcgttttttatttttttattggtttgtagtgatttttttgtttgggagttatagagtatttttatacgggttttttgttattttttatagtataaggtaaggtcgtaatattttgtggggtattttttttagtgtttttagttttgtgtgaatattagaagtatttgggggtttgggaaaatgtaattgttggttttatttttagttttttaaatagtagatttggggtggggtttaagaatttgtatttttaataagtttttaggcgatgttgatgttgttagtttgggatttatattgggagagttattgatttgttaggcgtgtaattttatttgtattattttttaatttttagggtaatttgttatttttttttattttgtaggtgaagaaatagagggaagatttagtgttttgtgtaaggtggtttagtttgtaagtggtagagtcgatttgaatttacgtttgtttgattttaatattgtattaatttttttttttttattttgtttttttgtattgttaattattttatatgtattttgttttttaataaaatagtaacgtttttttttgtatattttatattttttattttgtttgatttagtaatataggtttggttgggagggattgaaggatttggaaaggaaatgttttagtggagttaggatggaaatgggtttttttgtgttttttatatggtgttatttaaataaatagttatgtttgtgaggtttagttatggggagaggagggtaagagagtattcgtattaagcgatggggttagggggatacgaaaggaaatgtgataaatagagaggggggcgtgtggggtaaaggtgaggattggggattcgggagggggtaggttgttttagagtgaaggtaggacgggtagtagagatagagaagaggttgtcgggtggttagggttggggaggataaggagggtgaggatagacgatttcggtagtttttggagttagaagagaagttaggttaattttagatttttggtttttatttttgtattttatttaatttttttttatttgtttttttattttgaaattttaggaataacgtttatttgttttttattataatttttttttatatcgtatacgttttggatgtttggggttcgggaggaggggagttaggattacgggttttagggaagtgagtgtagaaaggggtttttacgagggtagaagtgggtgttgtttgtttttgtaggaaaggggttagttagtttaattggttcgtagtatttgttggggttggaggatgtttatttgtatttacgggattgagggtatcggagaggaggcgaataaacgagaaattttaagggtggagaagggagttatgggatcggcgggcgggtcgcgtagttgcggaattgggagggttaagcgggttttagggggaaatacggtcggtttttttgttagtgagatagagaattgagtatgggggaggaatttggggttagaggggttgggggtatttagagtagaggaaataggaagtgaggggtagagaggttacgggtggtggaaggaatagtagtcggttttggagaggcgatttttttttttcgaatatttgtattgtttcggatcgggagtgtagtcgtgcgtttttgtttttttagttttaggtttggtgtttagtttcgttcgcggaattcgaggttagtaaggtagtcgcggttttttttgatgtttttatttttttgtttttagtcgttgtttggacgagtatagaattagtgtttttaggcgatttttttttcgtttagtttcgttgttcggcgggtaaaggttgtgtatttatatttcgagtttgtagtttagtttgtttttttttgggaggtggttcggggattgggatgtcgaatagggagttttttcgtagttttttttatttttttttttttttttagttatagaaatcggttgttcgtagtgatttttaaatattacggttatttttatatttatatatattttttttttttttgagttatttttttgttttttttttggtgttgaaattttggattttagtttgggcgatttaggttttaggggggaaagtttggggtttaatttggtatttttgttttttatttttttttttagttttatagatggtttttatttttatatatatttgttaatttggagttttcgacgatatatttcgaataattcgatattttttttttatttttaaggttgattttatattatttttaggtttttttttttaatttattttttttttttttttttgtatatttttgataaatagatatatagaattgtaggttttaaagaggaaaaaagtacgtttgttgttggtaggcgggcgtgaatgggagggttttttattttttttaatatttcgtatagatgggacgttgtagggtaatagaaaaggtagtagatgggggcgtgttttgttttattttgtataatatagaagaattttatatagatattttgtataaaagttacgtgtttttatttgtgtttttttattggttggttgggttgggggtattgggggataaagaagttggggtgatagattaggatatagggatattttatggttttttttttttggttgttttttggtggggttattttggatttttggtgggagtatagtatagttttagtggtcgggatattttttagaattttttatttattagttttagggttagcgagttatttaacgtttgaggagggggtaaaagggagagaggggaaaagagagaggaaagttggagaagatggaaaaggaaatgaatgagaggtaaaaggtgattaagggaggaggaaagaaaaaaggaataataaaagcgataaggtaaaaaaggatatggatgatgggaaaggagaggggatatagaaagagatagaggatgtataggggaagagtgttgatgagttagattaggtttatggttttatgtggtttagattatttttttttttttttttttttttattattgtttttagaagtttttatcgtgaacgtttcgtttttaggtgcgatgtagatggtgtattgttttttattgacgttttttaggttgggtaaagtaggttttttaggatcgttatttttttcggtatttttatttttttcgttatatttattaggtttttcggtgttagaggcgttttttttaggtttttttggtttttttgttttttgttgttgttttcgttcgagggtaatgcgtagggttaagtatttggagaggtggtttattgtggtatttttagttgtttttatatatttggaatgggagggaggataggtttagagttagagcgttttagatgaggattggaggtaggggttttttaaaatggattttgggttggggtggtattttgggtttgggtaaagtttatttttgatggaaatttaggtgatttttggttttttagtggttggggaaagatagggttttttatttcgtttggtagtatttttttttttttacgagtagggggtggggtcggaatacgagtttaatttttttatttggttttggggggttgggggttttaggagggtttggggggtttagcgtttttttttttagagttttttttcggttattagagtttttcgaatcggtatttttatttattttattagtgtcgtttttttttgtttttatattgtttttttttgcgttttttttacggggtcgtttgggagtagggtttggggtagagttaggggcggagtttgagtttatattttttttattttttttttttttttcgggtttttttttttttttatttatcgttgtggtttgatttgattttggtatcggtcgttttatacgttgggttttgtagaagtaagtggttaaggttagaaggtatttaggataaagggtttagattttaaattttagagaattaagagataagaaaaattttaatgacgatatttaatatttattaaatataatgtgttaagtatttagtatattaagtgttttgtattaatttttttatttaatataatgaattttatgatataggtaattatattatttttattttatggttgaggaaattgaggtttagagaggttaagtaatttgttagtgattataggttgttattttttaaagtgcggtagtagtatatatattttttgtgagtttgtgaaatgtagattttcgggtttaattttagatttattgaattatagtttgtatttgaagatttataggtaatttggatatatatgaaagattgagagatgttggtttaggaggtgatttaatttttagtagtatgaattcggggtttatttttaaaatcgttttattgttttaatttttagaaagttatggggtaaattatattttttttttttttttttttgtgatagggttttgttttgtcgtttagtaggttggagtgtagtgtgtagtggtgtgattatggtttattgtaatatttattttttttttaggtttaagtgattttattattttagttttttaagaaggtaggattataggtatgtgttattatgtttagttaaatgtttaatttgttgtagagatgagatttttttatgttatttaaggtggttttaaatttttgggtttaagtgatttttttatttttattttttaaagtgttgggattatagatgtgagttattgtgtttagttttatattttttttaagaagagtagggttagttgtttattaagaaattgtaatttatatttatgatttttagttttaatgattagtttgtggttagtttttaggatgttgaggtttagaagttagtaggtaataaggattgatttacggatttattttattagttttgttttttttttgatttttatatttgtgtatggtttgtatgcgtagtttttttttaatgttggagtttaatgtttgttggttgtgtaggcggtttaggcggataagtattcggttttgatgggtttcgtatttttttcggttaggatagattttagagattagggtattaaagttggggtttggtcgtagggatcgtttggatattagtttttttcggtaggtaggatattttttgtttttggggtaggagaagggaagttttgagtggttagttaagggaattgaagtttaggttgaattaagattagtgagagggttttaattttgtatttttttattttattttaaatatgttttttttattattcgtttcgtagggttgtgataatgtagttagagtagaatttgtggaggtattttttggtggttatcgtattttttagtatgtttaggtagatagggtatatgagttttgaatgtagtgatcgaggggaaatagtaatttttgtgttatttattatggttttttgaaggtattagtgagtagaaaggtggtgtgggttagagggaaaggggttttagaaatagtagtttataaaataagaattttgagaaatatagtgagaagatttatgttggtttttataggagataagaattttgagaaagagaaggattgatgatttggagtaaatggagaaaagatagattttagtgtttattaattaagagtaggagttttggaataggaggatttgaggtggttaagtggtttaggagtgaagatggtataaatttgtggttgggaaaaattatttaataaaattttttaaagttttggtgttatttgtattagaattttatagggtgtttgttaaaaatttagattttgagaatttaatttattattgaattagaatgttggggggtatgaagttttgtttttaataaatttttaaagtgagttttatgtgtattgatttatgatattgaatgaggaatagggaaggtaatttttgtgtttgtgattttttaaatgaagataataatatttgttttatttttttggtagggttgttttgaggattaaatgagttaaatgcgaaagtgttttggaaagattaaggtgatttaaaggtagggttaggtaaggtagaatagagtaaattacggaaaagaagttgtgtgatgcggtttgtggatataagggtttgggggagggggtaagtttgaaagggagaatgtttgttatttgcggggttcggtgtagtttatatagatttagtttttacgttttgttggtattttgggtattcgtcggcgtcgttatggtgatcgggcgtagattttttattagggttttatagtcgaggagaaggcgaagaaggttgggggtggggggaaggggaggagggcgttaggggggtcgtttttcgcgtagatttcgtttttttagaagcgttttttttcgttttcgttttcgttttcgcgtcggtattgttttttatttagttttagtcgttcgcgttttcgtcgtcgtcgcgtttttttttaggttcgggtttttgggttaagttcgttcggttcgtaatcgttgtttagatagtagttttcgttatcgtcgtcgttatggttcgggcgttggggttttacgttattttcgtttgttttttcgttatattcgtttttttcgtcggcggagacgttatttattattcgcggcgcgggtgggacgggacgtggacgtcgcggttttttcgtttacgggacgggttcgtttcgcgtgaggattttgcgtttcgggagttttgcgttatttagggaattacggttttcgttttcggtttagtatcgtcgcgcggttaataattttagtttcggtttttttttagaggtttttacgcggggttttagtttcggggggtcggggtttggaatatttgggattttaggaggggatagagggttcgtgaaaagggttattttttttattttgcgtattttggcgattttggggattaattttttttattttttcgtaatttttattttaggatttcgggggaaaaggttgtaaaagatttgtcgttttagttttttagttttgagaatatatttaggtttcgatgtgttcgggattttttttattattttggggattttttttattttttgttttggttttttttagatttttcgattcgttttttcgttcgaggtttgggggcggcggttcgggacgtttagatttaattttcggtcggagttatagattcgagaattgcgtttggataattaggagtcgcggttcggggcggggaagggagggaggcgtacgggaggaaagggggaatggagatattacgcggaaatagggatatatataagatggagtttttattgggaagggggggtgcgcgtgtgggtggggtatataggggtagaatgtttggagtgggaagtgggtagaagttttttcgaggattttagagtaaacgaaggggatggggaggaaagagaagaggaaggggtagagcgatttttattgagtgtagggaatgagagggatatagggcgagggggtggggggtagttagagattttgatgggtattttgttttcgttcgagttgaggttttcggatttgggttgcggttgttagggggtggtttgtttttgggataaggtagtagtgggtgttttcgttttttattttagtttttttttatttttttgtttttttttttagttcgtggttagtttttatgtgggcgttagagtcgattagcgtagattttttttttttttttttttttttttttagtttttttttttttgttttttttagttttttttatcggttggtttatttttttaattttggtttttttttttaattttttttattcgattttaggtcggttgtagttattgtaaggtggagagaaaggggagggggggatttagagaaaggagaggggtgggggagggttatttgttttaagatttttttttaaggttagattggatattaagatggggttatgaataaattatttttggggattataagaatttagggagttggggggaggggattggtgttgtagaattagtggaaaggggtgacgtacgaatttttttttttaaaaagattcggagtgttacgtatatatagtgatatatattttttttttttatattcggcggcgggggttgttttgggagattaggtagagaaagggaataatttttcgggaaagggaaaggagggggaggtggggaagggtttgagggtttggatataagaagagtcggaggtggtagggaagaggatttggaatttattagggttataagtatttttgttttttatatttagtatttttgaattatatattgttattttttttgtattttgggaatttagagtttttattagtaggaggttaggtagagtggtgggggggtgagtagagtttagggtttttgaggtagttatatgaaaagattttttgggaggggtagaaatatttggatagatgtatgggtggagatataaatgggttagggggtatttatttttgtttttggttttgggaatttttgttttttttagtggttttagattttttttatttgtttttttatatagtttgggttttatttttttgttttttttttttttatgttggttttatattagtgatttttattgaggtttttgtgatgtatttattatttttagatgttaagaatgcgattatatttgttatatttatgagaatggtggggagagggtagaattttgtttatttttatagatttaaaatagttataattttttattaaagatatttttttttataaatttttttatagatattaattattagttttttagaaaatttttaaattttggggatttttttatttaggttttttttttagggattttattatatttagtgtttatttttagggttttttaagtgttttatcgggattattttagtaatttgtaaggaaatatttatgtgggtgaaagttttttttatggatttttttgaagattgagtttgtgatttttttttgtttttattttttatatatttattgaatatttaatgtttgttaggaattgtgtttagtattttttttttttttttttttttttttttgtgaagtttagagagattgagtttttgaatgattttgttttttatttatagttttttattttgtttattattttttgtggtattttttgtgttatgggtgttgtaatgaattttgggaggatagagttatagcggattttatgtttgtgggaaggagagtggttgtcgattttggagagggttgaatgttggtattttttttagattttttaggtgttttttagtatttttaagtatttgattaatcgtttaagttttcgggttgcggtttgggttagtttaattattttagttttggatgttgtatagtttgtttgttttacgttttttatttataggtgagttagagatgtggaatgagttaggagttttaaggaggggtttttttttttatattatttggttggttgatttcgtttaatttaatttgattttttttacgatgttattgatgttgatgatggaattacgataattattggatattagggtttgtgttgtagtttgagtgattaggaaggtgttttggcgggaaagggtaataagggagaaaagattagttggggtgatagtttttttttaattttttttttaggttaagggggttaaacgtcgtaggtttagagatcgttattttgaggttgatagttatgattttgttttagttatttttagatatgtgtagtagaaatttattttgggtgatgttcgtataggatataacgatagatggtgggcgagaaaagtaggtttatgggagggggaggttacgtattaaaaattttttataaaaagtcggggtagtggaggtaatattagagttttagagggggaaagtggtttagcgtttatttgtatttgttttagtaggtatttggcggttttggttttagatacgttagtttggaaggtagtatggttttttcggggcggtttttttttgttttttggttcgtttagtagtcgtatcgttttttgtgtcgttgttcggtttaggtcgtaggtagttacggtggtttttttttcggttaggcgtatattgatcgttcggtcgatgtcgtttttcgtatttgaggtaggatagaatacgtcggatcgggtacggggaggagagggtagggattagaggttatagggtagaaagtaaaatgtgggtaaggggttagaggttatagcggtcgcgtattttaagggtacgtttttgattttattttaatattttaaatcgttcggggaaagaatttttttaatttgtgattaaggttagtgcggagcggagtcggttttggagttgagacgttatggcgggttgtgggtgggtgggaattttagtattaagttaattttagcgtagaggggcgtggtaagggtaaagtcggggttaattaaaggttcgttagttttaggttatttgcggttattagcgtaggtcgattttttatcgagggggcgtggttcgatattgttgtttaggggtttcgggtgtggagaagataaggggttttattttttttaaaaagataaagattgtatgtggggcggaagatcggaggtttttattttcggttattatttttttttttcgatttaaatatagtgatataaaaggaatagaaataaaaaaaattaggttatgagaatattaattaatttttttttattttatttttttaattatttttaaattaggatatacgattgatgtttgatgtttattttcgattttttttgttattttttttgtttaggattttggttttttttgaagtttttattaattggtgggagaaaggaaattggattttggagaattttttgtgtagtaatttggtttttcgagaataggtggggtaggggatattaggtaggttgttattattttttgttttttttagttttttttatggttttatttagttttttaaatgtaatatggttagatagtgtttaatattatggtttttttggttttttatttttatcgttttagtttttgtaagattgttagtttttgaaggttttaatgttaaagtaattatttttttaggttatagtttttttttttggtagatgtttttggttagggtttttaatttttacgtatttttgatttggagttaggggtagaggtttggggtaggggtagtttatttattttttatttaaggtgggtaattagtattattatgataattttttttagtagttttagtatttttagaagtgattgtaatggtgatgttttttttagtagttcgggtaatatagatattgttgttacgtagataaagttatttgtagtaaatggtaggatttagttaggatttgtattatttgtaattttattgtttattgttttttttttagtgagaagggtataggttgtgtttgttagtgtttttattgttgttagtagttgtagacgtatcgtttgatgggtagaaaagagaaaaaggtatttattaatagttaaagattattagtggtttagaagtggttggtggggtataggtataggggatatggatttggaaattaaatattaaaataaaaagagaagagggagtagtttagaatagataatttttgaaaaattttaagagattagaggttttttttatagattttttgattgagtaggcgtgtgtgtgtaagattttattaaattatttagatggtttatagattagtttaagaaatattgagttaaaggataaagtaattagaatttttttttttttatttttagaggatttgttaatgatagtatgaattgtttggaattaataagaggttgtttgggtttagggtgagtgaggagagataaagggtttgaggtagttgtgtttggtagatattattaatttgttttttgttgtagttagattggattaagatggtaaagttttcgatttcgtggggtattttatgtagtaggatagttattgtggttaggatttttagttttcggttttttcgaaaggaagttttaatggttagattattagtgaagttgtgtgttaagttagtagttagatttaggtatttcgatatacgtaggttttgtataggataagaagagaaaatgattagaggtttttattattatttgttttagttttggttagttatttttatatttttttttagagattattttatatttagttttttagtgttttttagatatttgttattatttatagtatatattttatgtgatttgtgatgatgttttttgtttaaatttattattaattttggtttttatttaagtttttttttttttttttagcgttttgaggttttattggtttatttttgggtattgtgtttttttttcgttttttttgaattttttttgttttttttttttttttttttgagttttgtttttttttggtagaacgttttgagggaagaaaagagttggttagagtggagaatagattttttaatatgtttttttttttttgagggttataagatgaggagattttgaggtaggtaagttagtttttaggaaagttgtttttgggtttattttgttttttatgtttatgatttttacgtgtatgattgtgagcgtgtttatgtttatgattgtgattatgttttttttttatatgttttataaatttttttacgataagaaaggtaataattttattgagaatttatagttttatagatagaatggggttttggtttgggaatggaggtattgagatattaagggagatgtgtattttagattttttttttttaagtgcgggaggtgaggaatagggagagacggattttttttagtattttaatttttatttttatttgttttttttttattattgtgggagtgtttatgttcgggttgttttagagtgtggtgagaatgaggttttggaagaaggggggaaaattagatgagggaatatttgatataatgagtgtgtatttgggggaatatcgaaaggttagggattataaaggagaaagaattttttttttttaaagaacgaaataggttagatttgaggtagaagttagaggttatttattaagagtatgaggaatgaggtgtaggaaagtattttttaggagtttatcggaagtaaaattgagtaagatttgaagtagagagcgatgtcggggagagttcgattttacggggataaggaagaggataaaaaatggagttgttgagattagtattgtggtttttagtgtttggtgagggagagttaaggttaagtattgtggagttttttaataatttagaattagttttttttttttttattttttggagatttatataagtttagagagtgatagtatttaggttttgtttgatgtttggagttttagattttttatagtttttatggttatgtttatggttatgtttatgttttttgtggtagaggtttttatgggagtagttatggttatggttatggtgtaaatttttatgtgaatgtttatggtcgtgatcgtgggtatgtttatgttagatgttttcgtgagtgtggttatggttatgggtatggttgtggttatggtggaaatttttatgtgagtgtttgtggttgtggttatggaagtttttttgtagatcgtcgtgtaggtcgttatgattttcgagtttagttattagaagttttaaggtcgtttaggttagtagttttacggttatttagtggggggtttttaggtttttggttattacgttgattagagggatagaggtagtgattttatttgatttaattttatatttatatagggttcgttttattttaatcgcgtttttcgtttatttttatgggtcgtttttttatttttttaagtttttatttatattgtttttaagattagttttttttatttcgaattatttttcggatgtagggttttgggatattaattttttattagttattttatagattttttgggttttcgtttttacgatttattaggtgaggaaaaggtttggaaaggatggtagagaaaaaatagagaatttttatcggtttcgggatttttttttttttcggtttgtttggacgtggtagtttcgtttttagatttcgcgagaataggaagtttcgttttattttcgttttaatgtttttattaatatggcggtatttcggtagcgacgaatttattttgtattgatacgtatgcgcgagtgtggaggtgatttgaggggagggtgggcgaggcgggttaataggtcggaggagatcgttttttcggtttttaattagacgagggggcgggaattcgcgtcgagatttttcgtttgtataaagatggttgttatattggcgttgttattttggtattgagtagagcgacgggtttaattcgatttaatttaggttagagttttttttttaggggttttttcgtgtttagttaatttttcgattaatttttgggaatttttgggattttttcggtatttttatttttagttagggattatgttttgggtcgttcgttcgtttttttttttttagcggtatgtcgtagggtagtgtgggtcggtgggggtgcgaaaagaaatgtattgtggggtcgcgtttcggtggcggcggcgacggttttggttggatttcgtagcggcggcggcggcggcggtggtaggcggagaataataaatttcggagtcggagttaggggaggttggacgggacgggatgggcgatagcgggcggggtgagtgttttagtagaagggtaggcgagttagtgatcgttttatttgcgattttttttttatattttttttcggtgtttttttttttgcgttttcgtttttttgtttgtaaatacgcgttttttttttttcgagggttttagtattttttttttcggggcggggcggggaaggggagttttcgtttttttagttgtgatcgtttgaggttttgggtatcggaggtcgcgggtttgggaagggtacgattttttttaaattttaggattttgggcgtttataggtagattttgcgttttaggaggggttttttttgtttgttttttttttttgtacgttttggttatttggttttacgttgggaatagaggggttcgatggtttattttacgtgttgttttatttacgagataggtgtggttttgggatgatttggtatttatttaaatggattggttggaaaattttttttatttgaattatttttttttttttgttaattttttttttttattataatgaggagttacgttgtttttgggtttttttagttagttaaatatagtagtgggaggttgtatattaattttagtgatataaatgttaataagttttgataatttattattatcggattagtcggagttatattgttgtttgatagtagggtgtttttgaatttggggatgggtggagtgggttgggttcggtacggtggggtattagagaattaaagtttttagttggatgtttgaagatttattttttttttttgttttttttgttttttgtgtgtttgtgtgtttgtatatattttttttttagattttcgaagtttagatagtttttttttaaatttttttttttagggagttttttttttttttttttttgggttatttttattttttttaatagttttattttttggaggttttggggttttatttttattttcgatgttattatttttattgggttttttttttttagttattagtttttttatggggttttttggtttgttttttttagtttttttaggatttttcgggtttgttagtagtttttaggtgagaggttgtgattaatttattgtttggttatttttatttttttgttttttttgtaattttagatttttgtgtgaatttttttatggtttattgattttttaattttttaattttgttaggtttgtggtttttatgagattttttgttttttttgaggtgattgattttttagtgtatgtttttttttttaaaagaattttaatattttttgtttttgtgtgtgtgtgtgtgtttttttttttttttttttttgagatggagttttgttttgttgtttaggttggagtgtagtggtataattttagtttattgtaatttttgttttttgggtttaagtaatttttttgttttagttttttgagtagttgggattataggtgtttattattacgttcggttaattttgatatttttgatgttttttttatttatttgattttttgtttttttgattttatttgtttttttaagatatttgttttttagggttattgtgttgtataattttagggggggtttgtttatttattttggggttgtgttttagggatggttttttatatagattgtagtgtaaatgatagtttttggaatgtgtattgtagggttttgtttagtggtagggaatgatttttattatttttgtgatattttgttttttaataagtttttttgtgatttttttattttttttattttagattaatttaatagtgttattttttgggggtgggtttggtttttttgaagatgtgaagttattagttttaggggttcggggtttgtattgtttattttttttaggtggttttggggttggtaaacggttatgtgtaatttgcggggatagaagtttaggtatgtggtttagaggatgaatagagagggagagtttgggttatgtattattatttgtgggatttttagggtttatggagtttggttagagtaagtgatttgggggaggtttgatgggagtaaagaagttgaagttgagatgtaggacgcgattggggggaaggttagagggaaaaggaagtagcgtgtagggtttttgaatagtgaggagattgggattggattattatttagtttttggttttttatttttgtatttggtaaatagggaggattttaagttttgttagggggagattggaaatagattaaatggtgaaggtgtttttatgtaatttttttattgttttttttttttttttgtaggtaaatattacggggtttatagttgtgagggttgtaagggtttttttaaacgtattattcgtaaagattttatatatttttgtcgggataataaagattgtatagtggataagcgttagcggaatcgttgttagtattgtcgttattagaagtgtttggttattggtatgaagagggagggtaaggattcgttttgtttaggcgttttagattatatgttttttttttttattttatttagattgtgtatttttttggaagggtggattgtttttttttttttagagggcgatatttgattttttttttttttcgtagtttttttttttgttattttgttttggtttttgagttttttttttaatggttaggtttttgtggtttgtatatatgatttttttttagattgattttaggataggataatttttttttagttatgatgggttgtttttttatttttaatttgagtggttttttttttgattttatggattttttttggtttttgttttttgttatttgtgattttttttttaatttttgggattgggtatttttaagtttatagattttattgaagattttagggtttttttttttttttttgtgtttttattttatttttttaagttagatttttaggattttgagagatattttagagtatattttggttaaaatatttattttagagaagatgagtttgaggtttggtttttttaaggttatgtaataaaggagtggtaggtaggtttgggattagaatttatatttttaaagatttaggttagtgttttttttattgtttatttgttgagttagaagagtataagatttgtatttagatatatttagagttagttgtatgatttgttatgtattatatgaatttaagtaaattaatttttttgaatttcgagttttttattttaaaaatgagaataaatgtttttagtattattatgataattgagtgaatggtaaaatgtgtttagtatgttttttggtatattttatttaaaaaaatttttttttttaattagtttttttaggttgaattttggtatgttttttttaattatgtagtaggttttttatttaaatttttttttaatttttttatttattttatttttttcgattgatttatttgtttttttataattttttttttagggttgtttttagtttattttttttagtgatttttttaatttttataaatattttttaagggttatgagattttgatgaggtcgtaaggatatttgtggaatttttttatggttggttgttgattttttatttttttttttttttttttttttgtagcggtataggaggagcgttagcggggaaaggataaggatggggatggggagggggttgggggagttttcgaggagatgtttgtggataggattttggaggtagagtttgttgtggaatagaagagtgattagggcgttgagggttttgggggaatcgggggtagcggtagtagcgtgagtgttggggttaatttattttttttcgtgatgggggttgggggaggtagtttaggtttgttttatatttttttttttttttttttttttataatttttttaatattatttgggattggaggtgttgttaaataaggttttttaaatatttgaggtggatgtgatagttttttttgtttttattttttaaataatttattggtagaattataggtatgttttaaataaataattgtttgtattaatgttagaagagaagatttatttatagggattggtttggatggggtttataggaagattatatgtaaggagggggtgttaaaagttttttataagggggtttttagtatattttaaaattttttataatttttattttcgttttttgtagttaaatgattttgtgattaatatttgttaggtagttgataaatagttatttacgtttgttgagtgggcgaagaggattttatattttttttttttgtttttggatgattaggttatattgttgcgggtaggttagtgattttggatttttttgattttttgatatttgatttttttttgatttttcgatttttagtgattttagtggttttattttgcgtatttagggagttaaatttgttgatttcgttatttttttttttttttttttttattgatgtgttttgaattttttggtttgatttttggtttttgatttttgttgttttatttaggttggaatgaattttttattgttttttttttatatcgatttattgatgttcgagatggtattttttttgttataggtttttacgtgtatcgtaatttagtttatttagtaggagtaggagttatttttgatcggttagtggttttcggttaggttggtatgtagatagagggggtggggttataggttggttcgtgtttaaggttggttgagttgtgatttttgagtgatttgtaggtttttttttagggtgttgatagagttagtgtttaaaatgcgtgatatgaggatggataagatagagtttggttgtttgagggtaattattttgtttaatttaggtaagaggaggattatttttgttttttaaggttaaggtaattttggagttttttttttttcgagatttttaagttatttagttattttttttagtaagatttttaatttggaaattttttaattggtcgaggaaaaatttatatttacggatttattttataaatttagtgggttttgttttttttgttaggtttttggtaaagggtaagtaagtgtagtttaaaaggggtattttgtggtttatatttgtatggttattttgatttggtttgtttttatttttttttttttttttttttttgttattttagatgttaagggtttttttaattttagtgaggtggaggttttgcgggagaaagtgtatgtattattggagatttattgtaaatagaagtattttgagtagtagggacggtgagatggggttggggggtattgaggtttttttgggggtggggagtgttatgaggatgtgtttagggttcgtgtgtttttagtttttaattttttttttttatttttattttaggtttgttaagttgttgttacgtttttttgtttttcggtttattggttttaagtgtttagagtatttgtttttttttaagtttattggtgatatttttatcgatattttttttatggagatgtttgaggttttttattaattggtttgagtttagatttagacgtggtgttttttatattggaggagtatatatttaagagggattttaagttttggggtagggtggggggttatgtttttagaattttgatggggtgagaagtatagggtagaattaagaatataaattttttaagggatttgtttgatattttaagttggaagggattttagatatttgtgaggattggttgttttttttcggtggttttgagtttttgaatttgtcgggtttttttatgatttggggtgattttttattttttgttttttttttagtataaagtattggttttgtttttaggattttgttttttttttattttgttttattttgttttttatttgaagagtggaaatggggaatttttttagaggtggatattggggggtaggttttttaagttgatggatatgagagtagggttttgataggtttttttttttttaaatttggtagatgggggtttttttggaagagggaggggttttgttattgtttagagtttttttttatattttatttttttttgtagttagattgaaatataaaaaaggtggtggtggtggtgaaggggttggtggagatgtaggaatcgatttgttatttttaattttttgtgaggatagagatttgtagttagatttaaagaagtattgtatttttttaggttgattaagaaatgttagtggtggaggtgggtgtttgggaaaggtagggttttgaaatggtttgtttttagggttttttaagtattagtttttttagtttttcgtcgttttttttatttttttttgtttaatttggggaaggggtttgggttgtgaggatagggtttttataggggatggttttacgagtgtagtttcggaggttttttttttatagtttttttttagttttgggtatatagtataggttggggatataggattttggtttgagaattgaggggaggtggttagttcgtagaggtggggtgttggggttgtatgatttttgttttgcgttttttttttttggggtttttttttttttttatatataaaatcgtttttaaattaaaatcgttgttttttggattgaggtgattgtatgaggatgggtagcgtcgtttcgggtttggggggggtattcggttgggagtttcggacgcgatttttggacgtcgtcgtcgaggtttcgtggggtttaagaggtgtacgtagggtgggggatataaggtaagttttgtcggggagggggggagagggtgtgttaggttgggggcggggtcggtcggaggaggaagggggggcggtggatttttaaaggcgttttgttcgttcgtgtttttttcgcgttagcgggcggcggcgtttcggttcgttgcggtttttttttcgggcgcgttgcgggtttcgggtagattcggcgtcgtgttcgttcgtgggggcgtattgggcgtcgagcgttgcgtgttttttaggcgttgttcgttcggaggcggtttacgttttcgagtgattttatttttttggatttttttaattagagtcgattgttcgtttattttattattgttttttttttatttcggttttgggattttttaatcgcgttttttatttgtatttttttggatttgattattttgtgtttgtcggtgggttttagtttttggttttttgtttttcgtagaatatttttttttatatttttcgttttagttcgtcgttatttatagttttgtttataaatattttcgtttcggttcggttttgtaattatacggggcggggtgagggaagtaattatggagatttgattatgggtggggtggggattgcgatttttaggttcgttttttttttttttattgtgttttaaatttcgtttaggtttttgttgaaagggggttttgggtttttaagagggagggaatgggagggagtgtgtgtgattggacgtttgggttttagaaaaggaaggggttagggaagatattggggttttcgaaaagagaattttagggtataggtcgttgagatttataaggggtaggagagagcgagcgatagagggagggttttcgtttttttttttaggtggagattgagggtggggttttttttcggtggttgtgggcgggcggttggaggcgggggtcgggtcgggggcgggggcgaggtgggggttttgggcgttagggtggtcggggatatatagaagcggtagttatcgaggagggagtagtgtcgggagtttcgacggcgttttgttgtatggagttgggtcgttgatagttgtcgttgttcgtagtttttgatttttttgggatttcggcgtttgaggtttatagtttgttttttgttttttgttagttttagggtatttagcgttttaggtcgatttgggtttttgggattcggcgtttcggttttttagttatggagcggtgtagtcgttgttatcgtttttttttttttttatttttggtgttggggttgagcgcggttttaggttgggtaggtaagaggagttttgatgtttgggttttcggagttaggttggagttttgagtgtttttgggaaggggttagttgatgtttggggtagtagtttttgagtttaataaggagatttggggttttaaggttataggttggagggtaggatatttgtgttttttggtattagggtaggaatttttttgtttttgaagtgattgggggagggtagatagggttgaaaggtggaggattattttagagattttgaatggggatggatgtttgttttgagtttttgggaagagttgaagatggttagggttagttcggtttagttattgttggtgtggggatggtagacgttaatgttgatgggtgaggcgtgtgtgttttatggtttttttgtcgatatttttgggataaggggtgagtatttgtgatttagagtagagtttagtaagtttagaaagaaaggaagttttgattatttgttttattggttttttggatagggtttttttttttttttttgtgttttcgatgttgttacgtagttggttttggggagtattggggttggttgttaataggacggtttttcggataggttaggattaggtgtttgaggttagagttaattttttgtatttttgtttagttttttttttttttggttagttaggtttttttgggattttggtgtttataattttgatttttttttttttttttttaggatttagaatttttggtttttaggaaaggggatttgatgttaaggagggggttgtgagtattaggtttttagtaggttggaaaaagtttatttttggagatattgagggttgatttatatttaatttgattatttaatttttttttgttttagagagaaaatggttagaatggtagtataaaagatttagattagattatagaaggaagaatttttaagatgtgaggatagtgaagtttagggttaggaaattgaggcgtatggtgtttgtagattttaggagttttttttagggggaagagggattttttggtatggaggtagggggatggttaagatgattgttttttattttaggggttgagtgggtagagatgggattttagggaaatgagttattgtagaatttttaaggttagagaataaggtatttggggggttagaggtagagtggtggagggtaatggggttattagtggagagtttgtggggtagatgaggttggatataggggggtaagtatgtggtttggtgtgggaagatggtgggcggatttgtgggtaggttgtttatatgatcgaattgtatttttttgggatttggtggagggtggggattttcgaggtttttttggtttggggtttttgtgagtttttgtgtttttgttttatttatttttcgttttttaaagcggtttttgtgtgttggtgtttgcggagttgttatacgcgtaggggttaggtttaggtgggggttgggggggaaggtcgtggtttttcggtttttggatttaaagggttttttttttgtttgttcgttttattttatttattttatttagttttatttttttgattgttttggtttttgttttgttttatatttttatgaaagttttgttggaattttttttgggatttttttaatttggagttgatggtgtgaagagtatgtgtataggggagtaagtgagggtaaggtgattttttgttttttagggagtttgagttttaggaagttgagttttagttagatagggttggtgggttggattttgaatttttgggttttaggtggtggggttggtgggggtggtgagataggattgaggttttaggtgtggggagtttgtttgggttttgggtaagtattttgatgggatttatagatgtgtggtttagggttttggatttgtttcggtttttcgtggtagttttagtttttgttttttatttttttatttttttttaatttattttttaaattaggaggtatagatttttgggagagtttttttgtatttttttttttagtatgtttagggttgtttttattttattttttaaatttgggatttgtagttgtttgaagttttttttatagagttgtttttttgatttttttttcgtggtttttttgtattttttgtgtttaggatgatcgattgtttagatgttgtttgtgttggagacgggatagatgttagagatttagagagtgagagatatggaaagagagtgagagcgagggagagaaaaagatggatagaatgtgagagaaatggaggaagatagaagagatagagatagaaagattaatataaagagatagagagagtaagagagtgagagagataggagatagatgaagagttgagagaagtatttagagagtatagagagagatagatttataagttaaaagataaagagagagcgtaagagaggtagatgttaggagagataggggtaggagtgttatggggttgaatgttagttgatgttgttttgtttttaggtatttttgtattttttatttatttaggtattgtttagaagtaagtgagggtgaggtgattttttttttgtagggagtttgagttttggaaagttgagttttagattttaaatgttttttatttatgtttttttgagggtatgtttttttttttgataattatggatttttttaggtgtattttttgtggatgtgtttcgggttttgaggtttttttttttttttgatggtgttcggagagcgaaaggtatttgtttagttgatgtggtttatcgagtggtacgatttgtttagtttagtgtatttattcgttagttttttttaggtatgggtgatatggtggggtaggtttggggggaggtaatgggatggggtttaggattagatattaggaggaaaggggttgtggcggttttttttgttttttattttgtgtgtatttttttcggttattaggaggattttttaaagatttttttttgttgattgttgttcggattcgttttggtttttaagttttttttttgattttttatagtgtttagggtgttcgatagttgggtttggagttgggtcgatttgttcgttttttgtatgaagattagattgggcggttttaattttttttttagttagtttttcgaggttttagtttagtagatggtaagtaagtttgtttgtttttttggtttgtttggtttatatttttaggaggaagtgtttttaaatttttatattttaaattgtgaaatttttgagattttttgggttatattatatttatttattgtttaaattttagttatttttagtttagagtttgggttttagagtgtatagttttttttgtatgttgaattagtttgtattttgggtaagttatttaaaatttttgagttttagtttttatatttgtaaaatagatattaaatagaattggtataaataagaaagtgacggtatggtgtttggtgtattgtaaatatttaataaatggtagttattgttattattgtttttattattattggttttaatttttattattgttttttaattatgttgatttttttattttagttagttaagagtttatttgaattttttttattatttttaggtggtatcgtgtggttgtggttgtgaagggttagtttgttatttttattgttgattgtaagaagcgagttattcggtttttttttcgaagtgttcgtttagtattggatatttatggagtgattatttttggtgttcgtattttggatgaagaagtttttgaggtaattagagtaattagaggtaggattgatttttggttttttattttgtgtttattatttttttggttttagtatgttatttttttattttttaggtttttattttttttttttatgaatttttatttttattttttatttttagggttattgttttttgtaggagaattagatgtttatttatatggtaggattgtttatagttatttattttgttttttagtttttattagtttttttatttatttatttttttaatttttttttttttttatttatttattaatttatttattttttagttaatttatgtatatatttattatttatttttttatttatttatttatttatgtattatacgtttatttagttatgtatgaaggtttatatttatttatttgttaattttttttttgtttaattatttttttttttaaattatttatttatgtttttatttatttattttttttaatttttttatttagttatttatttatttatttattttttttatttatttatgtatataaggatgtatgtatttatttagttattatttatttattatttttttattaatttaattatttttttttttaatatatttatttatttattttttgatttatttattttttattcgattagttatttatttatataagtttatttatttatttatttatttatttgtttttatttattttgtaatttttgtttatttgtttattagtttatttttttatacgtatatttatttatttattatttattaatgtttttatttattaatgtatgtaagtttttagttatttatttatttatttatttatttatttatttttttatttatttatttttttatttattttttaagttagttaatattttttgaatatttgttggataaggagaataaagaagagaatataaagtttttattatttttaagagtttttaggtgggttttggaaatgagataatatttttaaattacggtgtaatggagagtatgttaagtattatgtgtgggtaaaagtaaatgttattggaatttaggaatgggttttttttattttatttttagaggtttagagaatttttattattattgttattggaaggttaaggtatttaaagttgagttttgtttttggaagttattgtggaagggtttatgtattgttataaagcgtagaggggaggtaaagaattttggaaggtttgggatttggttttgattttgttattttgggtgattttggggtagttattgtttttttgggtttttttgaatggaacgtatttgaaaaatgggtagaaagaaagatttttgttttgttaatttttttggttgttatgaaggttttatgagattttttgaaaattgaaaagggttatgtatatggaggattgatagtgatttttttttattttagggttttatttaggattggttttttatattttttttttcggatgatattttttgtttttttttgaattttttcgttttattttttttatgtttttgtagggtgatgtttaggagttggttattgttttaggggtttaggtagtttatgaattatgtgaatagaaggagttggaatgcgaggggggttagagggaaagattttaaaattaatagttttatagagtttagagatttttatagtagtaattattaagattttataggttataaaattaggaattttagagttaggtgagggagttgggagaatttttaagtgtagtatattttagagagggaagatatttaggtattttttttttttagttgttttttttatttttatttttttatttttattattttttttttttagtttttatttattagtttttttatttttatttaaaaataaaaagagttgttatgaagaatttgtggttgggagttgtgttttttgttttgcgtttttttttttagtttttttggaattgtgtttttgggtttttttttttttttttgaattaagagattgggagatagtgggagaggggtgagagttggggaggtaggtaggagaggggattgaagttaggagaaagtagtcgggatggtgagattaaggaggaggaatgggaaggagtagggatggagggaatattaaaggaggggtgggtttgtagaagtgtgggagtggggaatttagtttttggtttttatttatttggaggggtaggaaaaggggaggtagtagggggaagggaagggaagggaagggaagggagtttgggttggatggggtttggagagttagaatatagataggttttggggttagtggtttaaagattagagggttaattttttaattatgtttgtttttgttttatatgtggaattttttttttttgttttatttttttttattttttttttgatttttaatttttttttttatttttaattttttgttttttaattttatatttttttcgttttttaatttttatattatttttatatttttttttttcgttttttattttatattttttaattattttattttttttttgtttatgtttattttttaattttagtttattgagtttttttattatgattacgagtttttttattatgatgtgatgattacggggataatttttgattattaggtaaatttaagggatttttttatttttttttttttttttagtatttttagtaattattttttaggatatttttttttttttttttatgtcgtggggagaggtatagtgtgtttagattatggggatttatttagtttttgttttttttttgtttttttgttgtagcgttttgggagtttttattataggtttttttttttttttagggggtatcggatttttttttgaaagtttattttatttgttaagaggttaatgatttggtaggcgttttttttattaggtcggaggttttttttaattgtaggttttgatttagtatgggagtagttttttttttttcgatgtttagttcggagggtagttttttttattgtttggtttcgttttaggattagaggtagtagttatcggtaggtagagtcggggtatttagatttttgtttttaaatttttatgattttggaggtttattttttttaaattatttttttttaaaggggttgtaagatttgagattttttttattttttagtatagatagattttgttttcgggggataggtgttgttttgttttttttttgttaattttttttttttttttttatttcgtgttatttttttttttttttttttggggttaggattttattttaggtgaagaggaagaaattttggagtcgagttttttgttattttttgaggaggtaattttatgttttatttttattttatttgggggtagtgggtatttgtgatttattttttttagtttatgacgttttgatggattagttttttttttggtcggagggtttttttttatttttatcgatggtttttgtttttgggttattttagaattatgggtttgtttgattttttaagtttagttcgttttttttagtatttaggtttttttttatgattttttgatttttgagtgatttcgtttttatgttggtgtttaatggttttattttttatgttttatttttgttttcgggagttattttttgtttagtgttgttattttttgttttttttatttttttggttatttttggatttttttgtttgttattgtgtttatggattgtttattttgtatttagttttttggttattttttattttatttattatttttttttattggatttattttttggatatttttttttatttttggtttttgatggtttttttatttatatataattatttttatggttatttttgggagaaaaaatttagttttgattaattttggaattttttgggttagaagttgttatattttggggtttagggtaagtttttttttagttttaatatttttatttatttttttttttttttatttttgggaaggagtagatagatttttaggttttttttatagtcgataggttttaggtagaggaatatggggagggtggtatagatttttttgaagggttttacgattatatttatggttatggggatgattatcgtgaggagatagagtttggttttgttttttttgcggagatagtttatttaggagtcgtaagtgaaaggagttttttttttatttttgattattagtgggagttataagaattgttttttgttggtttcgatttttggttgttggttgtgagttattttttatttgtgatttgttattttttgtttatatatgatgtatatgttgtttgaaaagattattatttgtttttttttgttaaatgttttattttgtgatttttgtggatatttttgaagtttagggtaattgggaattaaaaaaaaaaaatatgtagttattttttgttttttttgattattttttgtttaattgaagttggattttataaagtttttggttaataaattattattttgtgtttatttttagtgtttttttattatttttttttggtgaaataattttttgtttatgtttttattaaacgatttaattttttatgttatttttttttaatttataggttatttattatttgtttttttttgttttttttagttgtggtatttattttggtaattgtgttaggttggattgtaaaggatttattatttttgttttggttttagttttttatgttattttgtgataattttttttgataataagttattttttgtatgttttaggttatttaaattataaagtttttattgtgggtttcgatattttttatggttattttttgtgtgttttagttttgatgtttgtgttttttggaagaattattttttattgttatgattttttttgtaggagttatattttatttgttttgtgttttttttttttttttgggttacggtagttatgttgttgttgaaggtttattttttggatttttttttttttattgttttttgtttgtttagttattttttgtttgtttagtttgttttttagttatgttggttatgtttaatttttttcggttttggtattatttttgtttttaagtgtttgttattttgttttgtgttttttagttgtttttatattttttagtattttttgttagtgggattgttttttgtttatttcgtttcgttttttgtttgttttgtagttttggttgttttttttattttgttgtcgtattttatatttttttttttttgttttttttgagtttttattgttttttttttatgttgttttttgggtatttggggttgatatgggattttagagaattttgaaacggattattgttgtttggttagaatgaaggtggagaggggtattttgaagatttttgttggggggagttggggtggtggtgaatgttttttattttttatgtttttattttgtttttggttttagagttgggaataggtatttgagtggaggtgtgtaagggagggaattggtgggtttggaatgtatttgagggttagaggaagggtaatgtatttagtggggattgttttttaattttttttttttttgaggtagggttttattttgttatttaggttggagtgtagtggtaggattttggtttattgtaatttttgttttttgggtttaagcgatttttttgttttagtttttcgagtagttggggttataggtatgtgttattgcgttcggttattttttgtatttttagtagagacggggttttatatgttggttaggttggttttaaattattgattttaaataagttgtttgtttcggttttataaagtgttgggattataggcgtgcgttatcgtgtttggtttttaaatttatttagagtatggatgtttaatttttggggtatatttaaatttgtgaattttttgaaattttaaataaaattttgtgtataatagtatatatttttttatttttggagaaagatttatagtttttattagatttttttttttttttgagatggagttttgtttttgttgtttaggttggagtacgatggtataattttggtttattttaatttttattttttgggtttaagttatttttttgttttagttttttaagtagttgggattataggtatgtgttattatatttagttaattttgtatttttattagagacggggttgtattatgttggttaggttggttttaaatttttgattttaggtgatttgtttgttttcgttttttaaagtgttgggattatgggcgtaagttatttcgttcggtttagtttttattaggtttttatgtgggtttatgttttttttttattttaaataaaaatttatttataattttagagagatttttttatgatgtattggggtaaatgtgtggaaggttttttaaggttttagggagggagtttgggagatgggatagggttttttagaagagggtttgggaaggtgggtggtttaaaatttttgaaaggggttaggtgtggtggtttacgtttgtaattttagtattttaggaggttaaggtaggcggattatttgaggttaggattttgagattagtttggttaatacggtgaaattttatttttaataaaaatataaaaattagtcgggtatggtggtgtatatttgtaattttagtgtaattttagttatttgggaggttgaggtaggagaattatttgaatttggaaggtagaggttgtagtgagtcgagatcgcgttattatattttagtttgggtgatagagtaagatttcgttttaaaaaaaaagaaaaataaataaataaataaaaatattggaagtttttggggatttttttgaaagaggtttttagggagatggagaggttgtgtttgttgaggtggggttgggaattgggggggtagggaattttgaggtttttttggtaggtttgaaaggtttgtgaagagggagttttaggggagggttgtggggttttcgggtagggttgaagtggtttcgagaggatttaagaattaaggttggagttgagatggagaaaggtttagtgttttggttgtttacgggttttattgggggttatatgtgtgttttttttaggttgtttatggatttcgagggttgaagggagagaaaggagagtttgtagtgttggaatttgtaagttatgttggttatagggttgaggtagtggaaataggagaagtaagtggggttgagtgtgttggttttgtcgtttttgatttttaatttttgattttatagggtatgttcgtggaggggttttttggtttagaaggttttgcggtaagtttagtagtgatttggtggttattttttttttagaaattttttttatgtgtttatttgagttttttttatatatgtttaggttttttttttagaattcgggagtatttttttaattaacgttttttagatttttagatttgttttgtatagattattttttagttataggttgagtgtttatatttgtttgaatgtttatatttgatttttatttttttgttttttagggattgattggtttttttggtatttaggggaatttaggtttagttggagattttggagagagggtaagggggtgttttttatgtgacgggggagtttcgggggagttagtggtatttaagcggggggttattatgtttagtaattttttgttaggtggtttgttaatgaatgaggggatggttgtgttttttagtaattagaaaggagggtagattttggttggggagggtgttgatttggttttttatttttaattttttttatgggggtgggagatttaggaaagagttagagtaatttatatttattttgttgaagaggatattttaaaattatgttaagattttgatgtttttttattttttattttattttttgtattttttttttattttagggtttttttggtcgagtagggttttttggattagatggggtttttggtttttttggtatattttttatgtttttagtgagttgttttttgggttttggaatatgttgatggggaagataaggaattgtgttatgttattaagaattagatgggtaggaaagatatggaggagtttttaaagattattaaagattattattttaaagggattcgtttttggggttggggagatggggttttattaggtgatttagaataaaatattagttttttaggattgggtagaatagtttatattttaggagttttagaattaaaagagagtttttttggaggtagaggttggatagtggaggagggtaggagttgagtttttggaattttttaagtgattatttggaagttatgggaaatgttggatgggtagaatttggggtaaggggtagaaacgttggagaaagtttttggttgggagggttttatggtttttttggaagagaatttggattttttttttttgtttttagtttcggtttggtagtggtgggggtgataagggttttgtggtggcggtttaggaggtttaggtttaggcgattttgtagtaggcgagggtgagtggggttgtttttttggaaagggaaggttttggggggtattggaagggttggttggagtgagtgtgcggtaggggaggtttgggttggtttggggttaatagggaggttggggagaattttgggtagtggatgaggattaggagaggaagggtgaatttggagagtgttggggttgggggtttttattgtttgttttttagttttgttgtttttttgtttttttagttggcgtttcgtggattttttggttttatgggatatatagggcgttttggatttttggtgagtgagtagggtgttcgggtggaggatgttttaattgtgtgtggggtgtggatagttttggaaaggggttttttttggggaatatttcgaggttattgttggttgtgtttttttttacggttattttttttttttttttttagggttaatttgggagttttggtttgaaaggagagtttggagatttaggattttaggtgattatttttttttattgtatttttatatttgtttattagtttagttttttttatttttttttttatgttttttaattttattttatttttttttttattagggttttagaggattttagggttttataggtttttttggtaaggttgggcgaagggtgagtgttttaggggtggatgggtgttgtggggagatagggtttgtagggtaggggattgcggttttgtttgttttgatattttttttgtttttttagggtcgggtaggtgttgatggagttcgagggatgtttggagattttggagtgaaggtaataggtttgggtttttttttgaagtttgtagtttttagtttacgttgggtttagttgttttttggggatgatttagttttttaggtttttttaggattagtatttttttagtttagggtgtagtagggaggggtgggtttggatagggtcgtgtttttattttggttattttttttttttttagggtgatcgaggttttgatggatttttagggttttttggagagaagggttatagggtgagtatattagtgggtgtgtgttgtaattggggatagattttttatgggagtgaggataggtagggaagggaggttggaggtttggtaggagtttagtgaaagtaatggatgggttaagtgtagaggttcggtgtttgtttgtgttgggggttttgaagttttttttatgagtttttttattttgtagggtgatattggtgtttagggtttttttggtttttttggtgaggatggagagagggtaagtgtagtggtaaatgtaggggttgggtgtaggggaggtttagaaggtatagtagttttatcgtgttttttttttttagggagatgacggggagattgggtttcgagggttgtttggagagtcggtgagtgtttaagggttggtgttgggggagggggttttggggaagttaggagggggatatgagtattaaagggatatagttttatttatttatgtcgttttttttttttatcgtgaatgtagggatttcgaggtttttttggttttaaaggtttatttggtatttttggattttttgtaagtgattttttgatttttgattttgaggtgattttttgatttttttaattttttatttttttagttgtttttttgtttttttttttttttcggtatgttttttattttttgtgagttttttttgttttggttttatattgttttgttttagtattcgtttttcgtgtatagggagggttatgtggcgtggtgttttgagggttttgggtataggaaataaatttttaagaaaaataaaattaaagtttataagtttatagatttatagttttatatattgtaggtttgggttagttgtgtttgtttgggtttgggatggattggaggtttgatcgttatattttcgggaatggtcgggtttttgaaaattataggttttttcgggttatttttaggttgtttatatttattttgtgttttagggcgttcgaggtatggatggtttttagggttttaaagggagtttggtgagtgatggataggagattttatttttatttttatttttcgaggtttttgttagtattttgttggtcgttattttgatttttgtttgttttttgtttttgtttttttggttatcgttgttgggatttagttttatgttttaaatgtgttttatttttatttttttttgatttgtgtttggttatttgtttttagggattttagggagagttaggattttttggataatagggtatttttgggatttaggtgagcggtgtttttatttcgttttttaatttttatgattttttttgggtttttataatgggtgagattttggaaggatataggaaattaagggttttaggtttttgttgtttatgttttgaattcgggaggttggatagaagagattttgggaggtttttgtgatttttttttttttgtatgtagggttttttcgggttttagggtgttatcggtttttatggagagaaggtaagtgattaagtgatttggaggatagggggtttagagtggggatgtagggagaattttaaatgtttgttgggattttgtttgtgtttagatatgatttttttagtgattttgagtttttttgtttttttgtagggtttttaagggaagttagggtttttcggtatgtttggtttagacggattttcggtgagtgggattttattttcgaatttagttttttttggttttttattttagtgtatgattttagagtttttttagtgatttttgtattgaaaggttattggtggtgtttgtttatggatagttggttttattaggttataggaaatttgggttggaagaagtgtagggaggggtgtagagagggtgataggggttattggttatattttttattttttatttttagggttatttagggaaggaaggtttttttggaattaaaggaaattaggtgagattttttatgtttttattttttgagggagtttttatttagattttagagttttaaagtttttgggatttttttgttttattatttatatggttttgttatatttttaatttttgtgtttcgtaattttatttagatagtaatgttgttatttttattttttttatttttggaggtttttatagtgatattttgaggtttttttataaatgttttttttttattttttagggtttttttggattttagggatttttaggatatttaggatttcgaggggttaaggtaattgattattaggttgggagataaagggttgtggttaggggagttatatggggttttaggagtttggtttttttaatttatttttattttttgattagtttatttttattttttttttaattttagggtgtggacggaattcggggtttgaagggttataagggtgagaaggtgagtattatgtttttagttttttagtattttagttttgttattttttttttttattgttttttttttagtttgtttcgtattgtcgtttagttttcgagtttttgtttttatttatgtttttagaatttttattagaattttagttttttgttatttgtggtgtttttttatttttattttttttagggtgaggatggtttttttgggtttaaaggtgatataggcgtgaaaggtgatagggtgagtagagattttatattggttttaatttcgtgttttattgagtttttattttggagacgttaagtatcggtttatttttttgagtttttagattttatagttttagtgttgtgtttttttgggagtttgatttttataggatgatagttttatggtttgtgttatgtttgtttttttattattatattatttttattttgtgggttttttgttttgtagtggtttttgggatttttttagttttttttagttttattgttgtttattttttttttgggtttagagtttatttttagtttttagtatttatttgttttttttttttatatagggcgaagttggagtttttggttttaggggagaggatggttttgaggggttaaagggacgtattggatcgattggagattttgggtttttagggtttatgggcgagaaggtgatgggatgagggttttgtgtttgggttttttgggggtgtgggtattggggttaggatgggtatgggtgttcgtcgttgaagttagttagttagttgaagatggttatgtattagttatatttttgtttgtgtaaatggtattttttagttgttgatgggtagaggggatatataagaagttagggaaaagtttttgatacgaagagttggacggagacgaagtttagagagtagttgttgttttaaggtagagtgaatatgcgttcggattttaagtagtaggagttttgagatgagagagtttaatagtagtgaggtttgtggtttttagagttgattttttttagtatttgttttgtgttaggtgttgtgttgatgcgttttatttattttatgaggtaggtatgtgacgtattgttttgttgaggttttatagaggtatagggatgtttgttgattatatggttagtgaagggtagagttaggggttatgtttaggtagtttggttttagaatttttgtttttaagttttgttttgtagttgtttgggtaggatgagttttggagtttttggggaagggggtatgtacgggagtcggggtgtggtgggtaaagggtttgtagggggattggttttggtgaagtaggagtgggtgttggggtagattttattttttttatggggtagatggagttgaggttgatatgtgggaagtagttagattatagtgattttgaaggatttgatatttttgtaggcgtaggggaggtgggattttagtattagaattggggaaaatttatttacgggaaggagagataataaaagttaggtagttgtggggtaagtaatgaggggttagaggttggggtgtgtggggtgtgttgttgggtgggggttggttgttatatgtgagggttgaggtttttaggggtggagtggtatttgggtttttttttatttttaattgttttttgtttttttatagggtaagttgggtgtttttggtttgtttggttattttggacgttagggatttaaggtgatgttatgttttatacgtgtttttttttttttttttttttttttttcgtttttttgatttttgattttagaaagtatagatgtagggtagtgggggattttagagggaatttagttgatttttattttatagatgatcgaaagaggtttagagagtagtaggggtttgtttaaggttatttagtttttggtagagttcgggtttttttggttattgtttttgtggttttttttgattttttttgtttttttttgaattttattttttataattttttaattttttttttttttcgtttttattaggggtttttaggattttttggtttttttggtgttagtggagagaagggagttcgggtaagttggggggtgggagggcgtgagaagggaagggttggagaggtgtagagggggtttgtggggagttttattttgggtaatgttttttttgttttatttttattagggtttgtcggggaagttagggtttcggggagaacggggttttacggtgagtgtaggggagagaaataggtggtttaaggtttagaggggggtatttgggtttttttgataattttttttttttttgtagggtttacggggttagcggggatttcgaggtgttattgggaagtttggagttaaggtgaatggtttttataaggttttaattgttttttgtttatttagttttagtttttttttaatattttgatttcggggatagttggaaagtagttttttttattttttgattttgtttttttttatagggaatatttggtggtgatggtttttatgggttttttggagagagggtgagtgtggatcgaaagttttttttttttgaggtttttagggagtttgggtgagttagttttttttttattttaggaaggaagttgagtttttttatttagtttttgtttttatttttttgattttttttatttttgtttttagggtttttttggattttagggttttaacgggttttttggatcgaaaggattttcggtaagttgatttcgagttttgatttatttcgtttttttgagttttttttttttatttgttttttagttgagagtttatttgataattgaattttttttagggtttttttgggaaggatgggttgtcgggatatttaggttaaagaggagaagtggtgagtgatgtttttggttatttatttttagggggttttattagattttttaattttagagttgtttggaaagtttatagggacgtttttttggtagagtggagtttgttttggtgttgtttagatttagggtttagggtttggtgtgattttgtttgggatttttttttttgggaatttgttttatagcgtttatatttgtttttattgtatttttttttttttttcgtttagggtttttaagggaagatcggtttttttggttttttaggagtggtgggattttaggtaggtttgtttttaggagagaatggatttttgattttagtattagtttgtttgttttttttttttcggttatacgtttttgtttcggtttatttgatttagatttttggggttggggttaatggtgggggttgggattttaggtaggggttttgaattttagtttgttttggggcgtatttttatcgttttgttttttaggagaggtagttttttaatagagatataaggtggtgtagttattttatatggggtaggagaaaatttagtagtggtttaggaatgtcggggaattttttaggagttttggggtagggataaaggggttttgaaggagtgttttagggtggttagggtgggtttttttggtagatagcgagatgaagggtttgagagtaggaattttttttgtttttgtttagggagtagtaggagaaatcggttttatgggggagagaggttatttaggtttttcggggttttttggagagtagggattatttgggatagttggaaaagaaggaataaaggttagtgaggggttaggtagaggggaagtgggggagttggggattggggtgttgaaaggaataggtagttggagatttgagggggggttggagagttttttgtttaatttgggagtatggttgtggtttattattttttttttttttttagggtgattttggtttttttggggttttagggaaggatggttttgttggtttgaggggatttttaggagagagaggttttttaggtattgttgtgagtgtgatttttagatttttgtttgttataagtattaagtattttgagtttttatttcgattttgtttttgattttttttatgttattttttatttttattttttggagtttgttttttttttttagtttttattttttttttttcgtgaagttttattttttttaaatgtttggtttatagggtggatttggtttgaaggggaatgaaggttcgtttggtttttttggttttgtagtgagtttggggtttcggaagtggtaggaaggattcgggaaaggggtgggtgaggaagggtgggagtggtattttgatattattaggggttgtggggttgggtagaggttgtttagggatagttagaatgtatttgattttgggagtttttgggaattgtggtttgaggttttttggtatgggcgggttggtgttttttttttgggggtttgattatttgtttttttagggtttttttggggaacgaggtgtagtaggattagggggatttattggttcgttagggcgtttaggttcgtagggtttttttggagtagtaggagagaaaggtgttttagtgagtgtgggggtattggggaggggtattggggaggggtttgtgagtttagggttgatgggttatgataagttttttgtggggtgtttgagggtgagggttatttttaggttatgattttttttttttgttttatagggtgagaagggttttattggttcgattggtcgagatggagtgtagggttttgtggggttttttggttttgttgggtttttaggtgtggttggagaggatggagataaggtgaggggattttatagatttcgattaattttttttttagatgagatggttgatttgggtatgatttttggtttttgttatgttattttttttattttatttattatttttttttaatattttgtttgttttttttttttagggtgaggtgggggatttcggatagaagggtattaaagggaataagggtgaatatgtaagtgtttatgattttgatttttgattttttggtttttaattttagttttatttgatttttttttttgttttggtgtttttgattttttttttttatttagggtttttttggattttttggatttattggttttgtggggtagtttggagtagcggtgagtgatttttttatttttatcgaaggtttagtagtttttggtttttttttagtttttttttgtttttgtggttgggagtgggagtaggggttttgggtttggtatttagttgtgtgtggtatttgtggatagagaatatttgatttatgatttatttttgtgtttttgtttttgtttttttttaattttgtagggagtagatggggagttcggagttcggggattttagggatattttggagttaaaggtgatgaaggaataagaggatttaatgggtttttaggatttattggtttataggtgtgttgggggataggataggggttgagaggtggggttaggatggggtgatgttttgttttagattttgttagtagtttgtcgatgtagattggagggtttgcggagtttgaggggaggggattgtggggtttatttgtttagggttgtgttttgggtggggtcgttatttgggtttatgttttgtatatttgtatagggtttgttaggtttttttggggagaagggagaaataggagatgtgggttttatggtgagtgtgatttttattgattttagttattatattagttatttttttttttggttagtttttattttatattttattgttaattttttggtttggttgtttttttttttttttttattatttatgtttagttattttattttttttttttatttgtggtgtatttgttttttttagggattatttggttttttaggatttcgaggtttagttggatttaatggcgttgatgtgagttattttagtttttgttttttgagattaatgtgtttggttttttgttttttttttttagattataaattttagtatcgttttaggggttaagagaagtttttattttcgggaggtttttattgttttattgttgtaattttgggttgtttatttgggattttgtttttgaaatggtatttttattttaagtaatgatatttatttttgttttttttttagggtttataaggttttttaggaggtgttgggaatttgggtttttttggagagaaggtaattgggaagggggtgagtggattagttatggaagtgggggatgggagttggatttttgttaattttgggtggggagataaaagagaatgagatgtggggaatattagaattttttggttggggaaggagaggaggtttttgattttaatttttttgtagggggaattaggagagttaggatttttagggatttagggcgagttaggtgttaaggtgagtgatagttttaaggttttattttttagttttcgttattcgttttaattttgtttttattttttttgtgatttttttgagttggaatttttttgtagtaagagtttttgttttttgttattttttatgaggtttgatttttggtttgagtgagttttttttttttttttttgaagggaaggggattagggaattttttttgtaggtttgattttttgtgtatgttttattgttattgaggggagtaggggatggttgaaggtgtttcggaagtagaggttgtatttttgatttttaagattttttgggttatttgtgtttttcgtttgttttgtagggtttacgcggggaacgtggagagaaaggagagtcggggtagttaggagagttagggttattagggtttaaaggttttataggcgatgatggttttaaagggaattttgtgagtttggggtagtgggggttgagtttttttaggttttgtgaatgatagatttgggaatatgggtgtgtgtgagggaggattttggagtgtggggagttcgggagtttgggggatgttttgggaatggggtatttagagggatgtttggggtttaggattcggagagaaagtgagagatgttttgtagttaatattttgaggaattagataatacgtagtgtacgtggtagggaaaggggtgtaggagatttttttttggggggtattggtgggtattgtttttagagaggtagtggcgtgtgtttgtgggcgtttgtgttgggtgggtttagggagttgtgattttgatttttattttttatttggattagggttttgttggtttttttggtgattttggtttttttggagaaggtggttttcgggtgagttttatttagagaagggaaggggtaaaaagggtggggtttttatgggggggttttttgtgtggtcgttgggtttgggtattgggaagtcgggggtatggtagggtgggtaaggggatggggtattgatagttttggaggtgatgttagttaggttgggggtttatttttgattttgttttatttttgtagggttaggatggtgttaagggtgatcgaggcgaggatggtgagttaggatagtttgtgagtgtttggtgattttattatttttttgagtttaagttttattttttttattttttttttgtgttttatttttgaggggttttttggttggaggataaatatttagttattttaatttttttttttttagggattttttggttttatcggggagaatggatttttagggttatttggaaagcgagtaagtgaggtggatttttgagattttgggaggtagtttttgggttgtgtgggtggaggttgggtaatggtaggtgggatgggtggggaggtgtttggtgtttgtattgttttgggtgtgtgtgtgtgtaggagttggtgggtttaagggcgtgtggtattttattgttcggggtagggtgtgtgtgtaggagttggtgggtttaagggtatgcggtattttattgtattgggcgagtgtgtgtgtaggagttggtgggttgatgggtgtgcggtatttcgggtatgtttgtttttgggttttggtgtgtatgtttttattaggggtagtggtggttattgataaagtagaatggaaattggaggaggggttggttagtttttttgtgggttaggggtgaatttttttagtttttggggtaggagacgggttattaggtagggtgtgggtaagtggttttttattaaatgtatagattatttagtatttttataattgttatagttgtatttgttttgtatatttgtgaatcggttttcggcgcgtgtttttgtgtatgtacgtgtgtgtgtgtatgtgtatgtgtgtgtttaggataggaagggggaagagttgagtttggttgtttacggttttatgtgttttttttttttattttatttgtagggttttgttggttcgtttggtttcgaggggcgataaggagggaagggagttaaggtgagggataggttgttttagtgttggagtatttttttcgttttttattttttagatgttttcgtttttagatgtttattttatttttattttttttatgttgggtttttatggggataggcgttttttgtatttgtttttgcgttaggggtttttagagtttggttttttttttttgttttttgttttttattttggattttttgttttttgtttatattttatttttttgttatttaggatatattttttgtgtgtgttttagggagattttggcgttataggtgtttcggggaagataggttcggtgggttttgtaggtttagtagggaaatttggttttgatggtttgagggggtttttaggtttagtggtgagttattgtagggaagggttgggttggggtgggagtgaggggttatgggaggggtgtagtgtggggatgttttttttgatttttgtggtttttttaaatttttagggttagtaaggtcgatttggagttataggttaggttgggtttttaggttttgtggtgagtgattgggattgggttgagtgaggggtgagggtagtgttttgggatagagttgaagttttggaggaagtggaggttgttggggagaatttggttttattttttttttaagagaatgattttttatttttttatagggatttttagggttgtttggttttcggggcgatgttggagttaagggagagaaggtgagtgatagatagatacgtggttaggtgttttttttattattttcgtttttgaaatttgtgggatttaagtgtttattgttttgttttaggttttcggtagttagttttagggagtttttgtttagtgagggttatttacggattttgtgttcggttttttttttatgtttttttggttttttttttttatttatatgatttttttttgtatttttttgattgtttgtatttttttttagggttatttaggttttattggattgattgggttttcgggtgagtagggagagaagggagatcggggattttttgggttttagggtttttttgggtagaagggtgagatggtgagtagagggtatggtttcggaagttgtgggggttgagagtggggtggagaggggtggagttggagttgggatttagttgtgggtaagcgagtaggtgtttaggagggtgtgggaggaggatttagttgaattagttattattttttttagggtattttaggagtattcggttttattggttttggaggttttttcggttttttcgtgagtattgtttttgtttttttataaaattttttaaatttttttgttgtttatttatagttttttaacgatttttatggaattattagtttaataagtatagtttttagggttttttatttgttttgttattattagtattttttttttatatttttagggttttgaatgttttagtatttttataagattgttttttttgtagtaattcgaggtttttgtggatttgggattttgttttttcgtttttttgagttttgttttttttttgtagtgatcgttttttttttgttttttattttatagggatttgttggttttaaaggagttaaaggagttatagtgagtgattttttttagttttgatttttgttttattttttttggatttgatgatgtttttttaggataaatagattttttttaaggagttttttattttagttaggaggttgatttgatttttttgtgattttgatttatgtttgattttttgatttttttatgatttgatttattttttgttagggtttaggcggatttaagggagagaagggtgtgtagggttttttaggatattcggtgagtgaggagttagggttgtttttagggtcgtatttttttgttttattgttgttatattttatttttatattaattttgttttttgttttttttatttgtttttgtatttagggttttttaggcgaggtgatttagttattgtttatttagatgtttaagaagattcggcgttcggtggatggaagtcgtttgatgtaggaagatgaggttatatcgatcgggggagttttcggtagttttggggggttggaggagatttttggtttattcgattttttgcgggaggagatcgagtagatgaggcggttaatagggatttaggatagttttgttcgtatttgttaggatttgaagttgtgttatttagagtttttcgatggttagtgttagttttagggtgtataaatatttttttaatagtatgggtattgaataagtagaatggatgttgggggagttttggtgaaggtgttgggttaagggtgagggttgaggggttgggaattgtagttatttattaattaggttagaagtattttaatattttagtaattgatttgggttagtgtgtattagttggttattagtttagtgtttgtaggagtagataaatatatatacgtgtatatatttgtttgtatttgaatagatgaatttgtgtgagcgtttgtaattatatgttgttttagtatgaggttgtttatattcggattttttttagttagagggtttggggttattgttgggggtagaggtgttacgtgatgaaagtgggttgtagtagtaggatgttgtagtagaatttagtagtagggttagattttagggttttgggagggaggaggattaggagattaagagtatgatggggagggttgggagggaagagggaatgtgggggtaaagagtattttggagtttggatttaggtggttttgatttttttttttttttatttaataggagagtattgggtcgattttaattagggttgtgttcgggatgtttttcgagttttttgtaattttatagtagggggtgagatttgtgtgacgtttagggatgacgttacgtaggtgagagttggtttttcgttgttttttttttgttttatagtgtatttttttagggtttagtggtttttgggttttggtgatagttttttggttgttgtttttttcggagtttgttattttttttttattttttagtttttttttttttttttttttatcggttttttgatgtttattttgtttttcgtgtatttttagttttttggtttttatttagttttttattttttttttagtttttgttttttagttattttttgtttatgattttggtttagttgttttggtgtcgtagatgtttttgaggttcgtttttgtttttttttgaggttagttttttttttttttttttgaggttagttttttttttttttttagtttttttacgtggatttagagggttttttagtgggtgtggtttagtttatttttttgcggttgtttagcgttttagtttattaggacgttttttatttttgttttggagtagttcgtgacggttttttgagatttcgtggggttaatgaggatgagttgagttcggagattagtttttatgttaaagaatttagagatggttgttaggtgggaataggaagagttgggttgggggttgattttagatttaggttggaggaaggaggtgggaagattttttgggtagggtatttagggggagtagggaggagttcgttttgttggattgttagggatgtttgagggagtttaaaagtcggtgaggaaggtggaaaggatggaagttatcgggtgaggtttatttgggtataaatattagcgttatataggttaatgtagacgtgtatatagattggtatatggttgtttagtagaggtatacggtgggggagaagtaaatatatacgtatgggtatatagatattgttagtttgtatattttgagttattttgatggggttaaggtgtttagaggagaggtgagtttgggtttgaggttagagggtggggggtgtttttattttgtttatatttttttttttgtttttttttgaagatatagtaaggtcggacggtgttggaggtgcgaacgtttgtgttggagtagttgttagtgttggatgttttttttttagatttgggagttttatcgaggcggggaggggtgttgttggggtttgtttgttttatgggataggatcgtttttgtttgattttgtttattcggaattaggtttatttggaattttataatattagttttgtgttattttttaagagggttttttattatttagggagttttgggttagggcgtggagagtttttagtcggggtaggttaggggaggggtgaagtggttgtttggatattttacgggaggagtggtatttggggtttttggtttttttatttggagtttgttattcgttagagagttgagatttttatttaaaatttattttttaattattttaaataaatggaagagaagagaaaggatatggcgtattttgtatttaaaagtaattgtattaattatttaaagtgtggaaagtaaaataataaaaaagagaaacgttaataaaaattagtagatgttgaagataggggtttcgggggtgggtttcggtatttatattttggagttaggattttttttagtgattgtgtgtaggggggttttagggttgaattttattttttttttattttttttttattttatttgtcgtatttattgtgaaagttggaatatgtggtttttttggttttagggttttgattttgttagggtggggttttttaatttataggtgttggttgtttggtttatgtgtttattgttttttttatttggtttgggtttggtaggtattgtttgttatttgagggttaggatgtttttttagggaagaaacggaatagtgtggggtgtgtgtagggttgtatttcgtagatggttggaatattaaaatttttttatattggttggtaaattgttatggttttgagttattgagtatgtttattgttatttttgttttttttttgggtattttttattttttttgattttgtaattaaagggttaatgtgtggtatatggaagggatttttaggattttgtgtttagtttttatgttgattgatggttaaataatgtgattgtttttttttaggtgtttgtgttattgtttgtgttgttattttagtttttttcgatatttatttgatgttttttttttttagttaagtggttattagaattgtatggtttaatttagatattttgtaagttttgtttagttggggtgttagggtttagagtttataaagtttgggtgattagtataaaattataaataatgttttagggatattaggtaggggtttggggtttttatggttttagtttttgatacgggtgtgcgattgtttttgggtgtgggtgggacggtgttatatagtttagtttaatttttgtaaatggggaggttgaggtttatttttaagatatttattgtatttgtatttttggttattttatttttttttattagttttgtgttgtgttgttatgaagatagggttgtggttaagttttttatatttacgtgtagttacgtgtatattcgttgagtttttgtgttgggtggagtcgtatagtttttgtttgtgtttttttatttttgattgttttttatttttttagttttttttttttgggtatttagaagttttgtttttttcgggttaggtgtttaagaagtttttttttttaaggttggtcgcgtagtcgggattttttagttggtgtttatggggttttatatttttaagtagtattgtttggtttttgtttgttagggcgttgtattaaaacgtgttttagggttttattttaatttttttttttttaattttttttttcgcgggcgttagaattaagagtgcgtgtttttgtgtttcggtttcgtattcgcggtttcggggcgggtttggtagggttgttttttatttcgagttcgagttcgggtaggttgcgttttcgtttttttttttcgtattttttttttttagcgtgttttcgatagtatcggtttggtcgtttcggttttaatttattttcgatcgtaggaagttttacgtgggcgtttagacggttattttggttcgggcgggtgcgcggaaaaatttttcgagggtggaagttttttttcggcgttggcgttttcgtttttgtcgttttttagtgttcgcgttgagaacgcggtttcgtatcgggttagttgaataatttcggttttttagacgttttttttttgttattcgttgaattttttgatttcgaaggtcgaatggaggaagaagtttttgattttatttgttaggggttcggtggtggataggttttttgggattatttatgttttttattttaatatttaaggtttaggggttttagatattttttttttttttttttagggttatattaagagaagattagatttaaataggtgttttttatttgtttttttcgtatttatttttagtttagtcgggttggagttgagatttttttggcgttttttttgtagttggagttaaattcgtagaggtcgtttttcgaatagtaagaggatttttttaaaggttacgtttggttagatgttttgagtttcgagggtttttttgtatggaaataatgttgtatagttattcgaataatatttatatacggcggttaagtttttaggttaatttataaaagtttatttaattatatagtgttgttaattaattttatttaatagttttacgagggagtttgtgttaagttgttgttgaggaggttaggtttatagtttttttttggtagttaattttttttttttttttagaaagttagagttaggttttaaggaagggtgggaggggtttaagggtagggttgtagaggcggggttttggggtggggttgggtgtgaatagggtaagtgtttaggtttttgggtttgtgggtagtggtagtgtttttattggttggtgggtaatggaggtttttgggtggggtgggaggagatagggaagagaaaggtagaggttttagggaattattttgggtttgattggggtagaatataaatttttgttggaggggttaaattttgaaaagtattgattgtttatggaaggagttgaatttgaatttaaaaattaagagttatagatggtgtttgaaaaggtaagtgatatgatggaattgtgcgttggtatggtggcgaaggagaggagggtttgggatggggcgtatagggagattatgtttttttttgttttttgagatagagtttcgttttgtcgtttaggttggagtatagtggcgttatttcggtttattgtagtttttgttttttaggtttaagtaatttttttgttttagtttttcggatagttgggattataggtgtgtattgttacgtttggttaatttttgtatttttaatagagacggggtttttttacgttggttagtatggttttgattttttgattttatgattttttcgtttcggttttttaattgttggggttataggcgtgagttatcgcgtgggagattatgtatagagggagggttgtggggtgggttttttggtttgttatatttttggagttgttttttagttttgggtttatatttttagtatttgtaatttatggttaaaaaataatttgtgaaataaaataaaaataatttatagattatttatattattgtatttgggagtattatatattttagaaggttatgggttatatagagttgtttttgtttttttttggttgttttgtatgttgaggtttgtagttttgaatggattagggtaggtgggggtggagatgagatagaggagggagtgagttaaaataaggtttttagtttgggtaataaagtaaaattttttttttttttttttttttttttttttttgagatagggtttttgttatttaggttggagtggagtggtaagattaaggtttattgtagtttcgattttcgtgggttttagttatttttttattttagtttttcgagtagttgggtttttaggtatgtattattagtttttgtattttttgtagagatgggattttgttttgttttttaggttggtttagaatttttgggtttaagagatttgtttatttcggttttttaaagtgttgagattataggtatgagttattacgtacggttttttttttttataaaaaaataatttaaaaattagttgggtatggtggtatgtgtttgtagttgtagttatttaggagatttaggtaggaggtttatttgagtttaggagtttgaggttgtagtgagttatgtttttgttattgtattttagtttgggtgatagagagatattttattataaatagataaataaataaataaagggttttagttgttttagaaataagtttttgtgtagtagttggtggttattttgttttgtggttgtttagtttatttttttgtaagtgtggtgtggttagtagggagtattagggttatattggagtttttttttgtcgagttgtgtagtttatagattgtatatgtgtaggttatagttatgttttttaatttaaatttagagtaagtagaagttattttaagtgtttataattggttttttgttatttttttttttatttttagagtagttttatgggaattggtattgatagtagattgttattttagtagggaagatttgttttgttagtttttgaataaagattaaggatatttatatgggttttttttttagggttttttttatacggttaggatggtagaatgaatatagtttttagttttagcgagagttagtatattattttgtttggtttttttttagttggtaggagtaggttaatttattttgtgtatttcgttttggtttttttttttttgtttgttttttgtttttgagatagggttttattttttttgtttaggttagtatgtagtggtgtaattatggtttattataggtttgattttttatgtttaggtgattttttttttttagttttttgagtagttgggattataggcgagtgttattatgtttagttaattttttgtatttttagtagagacgtggtttttttatgttgtcgaggttggttttaaatttttgggtttaagagatttttttgttttagttttttaaagtgttgggattatttggttttttttttttttttttgagatggagtttcgttgtgtcgtttaggttggagtgtagtggtataatttcggtttattgtaattttcgtttttcgggtttaagcgatttttttgttttagatttttgagaagttgggattataggtgttcgttattacgttcggttatttttttttatttttagtagagacggggttttatcgtgttagttaggatggtttcgattttttgatttcgtgatttattcgtttcggttttttaaagtgttgggattataggcgtaagttatcgcgtttggtttatttggtttttttttttattaaaaacgttttattttaggttgaaggatttttggtttttgaggtatggatgattttttaaagtataatagataaaagttatattggttgtatagtagtttatgtaaaggttatgttttaggttttggttattttatttataataggtttggatttcggtagagttttaggttaaagaatgtgggttatagagatattttttttattgtgtttatatttttttcgggtttgggttatattgttgggttaggtaatcggtttgttttttttatgaaataaggtatattggtattattaatgttgggagagattttttataattttatttttttttagttgtggttatttgtattaatatttgtaggttttttttatttttagaattgtaaatttatagaaataaataaattttaaatttaataaatatgttttagagatattagggttagggagaagatgagaaatagtattttgtttgattggggttttggggagagagggatttagataaaagagtttgagtggtaggtggtttagttttgggtgggttgagtagatttagggttaaaggtggtattgattttagttggtagcgggtttttttgtatttttaattgagagtttttttttttttagtttgttagggatgttttgtttttgagttgtatatttaattttagtattagtttttttatttgtaaagtgggataatatttgttttgtaaaggaataattttttttttattgatagtttttgtaatggaaagtgaggggagggatttgataagttgttttggttttatttttatgttttggttattgttgatatacgggtgtttggggtatgttgttgttttttttttatttttgattttagtgttgttaaaattttatatttattattattatttttttgttataaatcgtaaaatttgatttagaatagtttaagttttaaaaggaattgattgtaaaaatattgggttttttaggatttgaagatagagttgatttaatagggaagattgagagtagttttgggaattttaggggtttatggattttgtttttggagtgtggatatttatcgtttagtagagttgtttttgatttttgtgtttttgggttttatggtttaaagttatggagagataatttgattggtttagtttgggttatttttgtttttgagaattaattttttgtggttgagggtttagtgtattaattaagaggtatgtaggatgttttttggtggaggtggaggggtgttgggggtattgtttttagataatgtgggattttgaggtttttaggaggtgttcgtttgttttttttttttcgtttttgtttaaatagatttttttgtatgtatttgattagcgtgatataattagtttttttatgattatatttgttttttttgttatttaattttttggatgggtaatttaaagttatatttagtagttgtggttatgatttttttaattttagaggtcgatatttttgttagtttatattttgttattttgtgatttagtatataaatttttatggtcgttatatttagggttgtattgtgatttttgcgggttttatgtatttttttaaataataaatttgaaattatatttatgattgtgttgatatataggtaattatattaatattatatattaaaatattttttttaattttaattttttttttattttaaaagaaatgtaaatattgttatgggagtattgtgggttttaggtattgtggttattgtatataatggatttatgggttttttttgtgtttttgttaaagattttattggtttatttttaaaatgtaattataattttgttattataattttaataattatttttgttgttattaaatatttagttagtgtttagatttttaagattgttttgtaggttttgtgtgtgtgtgtgtgtgtgtgtgtgtttgatttatgatttaaataaagttgatggttttttaattttttaaagatttatatttttcgtaatttatttaaagttttttttgtttatttttattatggataaatttaagtatatataaaagtggtttattattgttttttttttttttgagatggttttgttttgtcgtttaggttggagtatagtggtacgattttaatttattgtagtaatattcgttttttaggtttaagcgatgttttagttttagttttttaagtagttgggattataggcgttagttattatgttcggttaatttttgtattttttgtagagatagggttttgttattttgtttaggttggtttttaatttttgagtttaagtaatttgtttattttggttttttaaagtgttggaattataggtgtgatttattgagttttgtttgttattgttattttaaaaagaattaatatatgttaaaaattttttttagttttaattttgaatatagtaaatattaataataatattgtaagtaaagttttttagtgtttttagtaatttaaggggtttatatttttaaaatattgagagattttttttaaattgagatttaaaaaaattgggaattattaatttagaagaattgttaaaaatagttatgtttatttgtgtttatttttagagatttggatttaatttatttggggcgtgagtaaagggatttgtgtaaaatttttttaggtaattttaaagtgtaggttgtgttgagaatttttgttttaaattggagagatttcgtaagaaataagtagttaggtgtagtggtttatgtttgtaattttagtattttgggggattaaggtaggtggattatttgaggttaggagttcgagattagtttgtttaatatggtgtaattttgtttttattaaaaatataaaaaattcgttaggtgtggtggtacgtgtttgtaattttagttattggggaggttgaggtaggagaattatttgaattagggaagtagaggttgtagtgaatcgagattatgttattgtattttagtttggtagatagaatgagattttgttttaaaaaaaaaagaaaagaaaagaaaagaaaaaaaaggaaataagtaaagatggtcgggtgtggtgttttatatttgtaatattagtattttgagaggttgaggcgggcggattatttgaggttaggagttcgagattagtttgattaatatggagaagttttatttttattaaaaatataaaattagtcgggtatggtggtatatgtttgtaattttagttatttaggaggttgaggtaggagaatcgtttgaatttgggaggtagaggttgcggtgagttaagattacggtattgtattttagtttgggtaataagagtgaaattttgttaaaaaaaaaaaaaaaaaaaaaaaaaaaaaagaaataagtaaaggtatagagtgggaaaggtaattaaatgttttaggtttgaaagggttttttgggatttgttgtatttagtagaaatgtttgtaagtgtaggtttagataatttaaaaaataggggttaaaataaataggaatttattttttttataagaaatttgaggatgatagtttttagtattggtttgagtatttaatgatgttattagggttttagattttttatatgtttatattttatttttttataatgttatttttatatattttttttggttaaattataagtacgttttttataatagttgttttatttatattattgttaaatatgatatttattaataaagaaaagacgtatgagacgtgttcggtattttttagttgtagaaatgtttgttattattttgttgttatgaaagagttattttatggttattgtaaatgttttgaagatattaagatttgtatttggaagttatagatgtagtgtgggaaattgggaagtataattgttattgaattgttattgatttattattgtaaataaatttatgtaggttttttttgaaattgagatggttttgaattgaataaatgttttattgatatttataatagtggttggtattttttttttattttgtttgttagtttttggaatttattgattagataaataaaaagaattttatttgttttttattaatgagttttacggaggggtatgatgttggaaaaggtattatgtaaggtatgattattaagaagataaagggtttgtcggggagttgttagggagggttttgagttagggtttgggaaaaatattttattattttattgtatttgatgtttggaagtgatatgtgttttgtaaattttagtttatgttttgatgattttgtgtttgttttgtttggttaggattagttttagttgtgagaaatagaaaattttggaaataatagtgtttttattaagatagaagtttattttttttttatatgtaattttagggttggtgtagtgtttaagtgttagagatttaggttttttttatttattttttttttttattagttttaatatagttttttttttttaggtttaatatgattgtttgaattttagtttttatgtttgtgttttagttagttgaaggagaaaggggaaataaggataattttttttttttttcgtttttttttttttttttttttttgagagggagttttgttttgttatttaggttggagtgtagtagtggattttagtttattgtaattttcgttttttaggttttagcgatttttttgttttagttttttgagtagttgggattataggtatgtgttattatgtttggttaatttttgtatttttagtagagatggagttttattacgttggttaggttggttttaaatttttgattttaagtgatttattcgttttggttaatatttttaggtaaagtattatagtaggagtttaaaaataaatgggttgttttgttttgttcggaaattttttttcgagggattgttttgttttttgaagtatttgaaggttaagtatttagagtttgtgtttatggagtagttgtttttttttttcgtgaggttattattagttatttttgtatatatgtttgtttttgaggtgtttggttgtttgaggaggtttttggttttgttagtatattattaggatatttgtaacgtggattaagattttttaatttaatttaattttattttatttttttgagatggagtttttttttgtcgtttaggttggagtgtagtggtataattttagtttattgtaatttttgttttttaggtttaagttatttttttgttttagttttttaagtagttaggattataggtgtttgttattatgtttgttgcgggaagttagggattttaaatggagggattagttggagtcgaggtagaggaatataaattatgaagattttattttaatatggatatttattatttttttaataatgtttttataattttttacgtttgtttttattttaatttttgaatataaattgtgaagattttatggatatttattagtttttaagtaatatttttataattttttatgtttgttttattttaattttttaattttgttatttttataagttgaggatgtacgttattttagggttattattgtataaattgattgtaaaatatgtgtgtttgaataatatgaaattagtgtattttgaaaatgaatagaataatagcgattttagggaataaggaaagataattataaggtttgattgtttgtggggttgggttaaaagagttatatttttttttttgtagagagtttataaatagacgtgtaagtaggagagatatcgttaaattttttttttagtaaggaatattgataattaatattttgggagaataattgtatttttgggggggaggtttataaatagtcgttttgggagtgtttgttttatgcggttgagataaggattgaaatacgttttggttttttgtagtatttttaggtttattagggtggggaaaaattttattttggtgaatttgaggttagatcggttttttgttttcgaattttgttttttattgtttaagatgtttattaagataatatgtgtatagttgaatatagatttttattagtaattttaattttgttttttgttttgtgatttttgttttgttttttgttttgtgatttttattgttttttgaagtatgtgatttttgtgatttattttttgtttgtatattttttttttttttgaagtttttaataaaaagttgttggttttgtggtttaggtggatattatggatttattgatatgtgatgttatttttggcggtttagttgtaaaatttttttttttgtattttttttttttattttttagattggtcgatatttagggaaaatagaaagaatttgtattgaaatattaggggtgggttttttagatatatgtttagttaatttttttgtgtttttagtagagatagggttttgttacgttggttaggttggtttcgaatttttgattttaggtgatttattcgttttagtattttaaaatgttgggattataggtattagttattgtatttggttattttaagatggttttaatggttagaaatattagttaattgaatttttagagatatatgttatttaattttgtatttaatatttaagttattaaattttagtggtttatatatttgtttggtttttaagatagtttggtttttaagtttgtgagtattttttgtgatgatggaaatgttttatatttatgtaatttaatgtggtggttattatttatatgtggttattgagtatttgaaatatggttagtgtattaagaaatttaatttgaaatttaattttaattttatttaatttaaatggttataggtagttagttagtgttattatattagatagtatagttttgaggtttttttaaggatttatataatttaatgaagagatttaagtttaatatagatgtgggatatgtagtttttataatttaaatacgttaattaatttttgttttttttttttaagttgggggtttttaagtataaaggtttttatttggttttgggtagaatttttttttttaaaattttattaaaatttgtgtttttttatagtttgttttttttaatttataaaattaataatggaagatagaggtttttgatgtagttgttttaaaaaaaattaggtttaggttaggtatagtggtttatatttgtaattttagtattttgggaggttgaggtgggcggattttttgaggttaggagtttgagattagtttggttagtatggtgaaatttcgtttttattaaaaatataaaaattagttggatatggtggtgcgtatttataattttagttatttggggttaaggtaggagaattgtttgaatttgggagggggaggttgtagtgagttaagattgcgttattgtattttagtttgggtaatagagtgagattttattttaaaaataaataaataaataaataaataaataaataaataaataaataaaattaggtttattgagatataatttaaatatagtgaaattatagttgtatagttgtttatgagtttgataaatatatttattgtgtaattattattataatgaagataatatttttattattttaaaaagtttttttatggatatagttttttttaagttatttttggttaatgtgttattaggataataaaataatgttaatttttgaattggatttaggttgtttaaattttgtttaatggattgtatttcggaggtgggagaatttattttggtaatttagtaaaggttggggttgttaagtgaaggtagattgttggtgaatataatttattgggattgaaaaggatatattagttagattgatgtatgaatgttaattaagggttgatttagtaagattttttattaaggaaataatattatgtatagtgttaattatattttttttataattgagttaaatatttaaagtgattagaatagttattgttatttaatattattttagaattagttgttttttttaatatcggtgtaatttataatttatttttaagttttattttttttttgattggttaaaatgagttgttaaagagttttattttttattttagatttttttaataatgttattataattgttattttatatatttttttagggatttgttattattttatattacgttgttttgtggggaagtggaattttagaggtttttaagagtttttttagtttttatagttgtaatcgtaagtttagataatatgtttaggggtaggagaaattattatagaagtttttttggttttttgtattttttattaatgttttataattttttatttttatatttttttttttatatattttggtatttaaaatagttttttttattagattgggtttttttaattaaaagttgttattgatgttatattttaaagtttttggaatttttaaatattgttttttgtttaaattgttttaacgtgagtgtagagtgtttttagatataggttggaatagatttggagggaagaatattggggttgtttgttttatcgtatgagaggatttggttttagggtaaagttttttaagtttggagaatgaatcgaaggtgtggaagtgttttgtttttgtatgttttaagagaaatgagtttttaacgtttataagttttttgttttggtattttttttcggtttggtttttagtattgttaaattatatgaattgagggtttgttaaaattattgttaaatttgtagtttttgtatttgttaaaattggattatttttgatattttttttaatttgttttgtaattttgttaattttttaatgagtttattgtgttgttgggatttcgatatttttaaatttaatgagttatgattatatacgttagttttatttttattgggtttttaaatttttttttatttttttaattttttagtatttttttttataggcggttttgttttaatttgaaattaaatgagaattttagttttttcgttttattagttgttagtattttaagtgtttaagagttatttgtggttagtggcggttcggttggatagatatagaatatttttttaatagtagaatattgtataggatagtattgtttaagggattgtttttcgatgattatatttattttatagatattaggattgtttaattatgtatatttttttttttgtaaatacgatgtcgaaggtttttttttagtttgtaatttttaataaatattttagaatttttattgattaattttttatatatttgtgtaataaaaatatatgtatttatttaattttttaattgataaaaattgaatttgtttatggtatataatatgatgtttatatatatatatatatatatatatatatatatatatatatattgtttaatggttaaattaagttaattaatatgtgtattattttatatattttttgtgttgggtgagaatatttaaaattatttatttagtaatatttaagtatatagtatattgttattaattagagttattatgttgtatagtatatattttgaatttattttttttgtttaattgaaattttgtattcgttgatgttagtttttataattaatttattaaaaatataattaggttatagaggttaggaggttttgaaaaaaataaaaaattaaataaaaaatgtaattaggtttgtttggtaatttagtaatgtttagtgtgtaatgttttttatagtcgttgttaaaagtatagtaaaattatagaaatttatgtgttgttaaaatttatgtatttggtcgtatttattttgatttgtgttttttgtgtgtttaattttttttttaatttttttttgtaaagaatgttggagtatttttaaattgttgataaatttttttgttttttgttttaagtttagattttagtgttggttattaggtggggataggattttatttttttatagttttaatatgattttgaatttcgatgttttgtaatggataatttggtttttttttcgaaagttttaaaatattttttttgtgaatttaaaataatttatagttttaattttttgtagttatttaataaaaaggaataggaaataagtgttaaattatttatttatagtgtttttgtatggaaatttttatttttaagatagttggttttacggtttgatttaatggtgagaaatttgagttgatttatagttttttgatagtattttgatggtattatgttaggataaatttttggttaaatagaaaattaagggagatttgtttttttttgttaaattttaaattaatttattagttttttttataaagtaaaaggtgaaatgttgaggattttgagttggcgattaatcgaaatgatttttaaattaagttttttttaatgatgattgaagataatattatattaattattgggtattataaatattggttttttagttttttgttgatgagatttgtttgtttgtgtattttttttttaaaattttaaatagtgaagttttttttaagtaatggaggtttatttatagttaaattttttgtatgtaaaattttttgggtataaagtagattgttttttttttgttttttttttttttgagatagggttttattttgttgtttaggttggagtgtagtggtattattacggtttattgaagtttttattttttaggtttaagtgttttttttgttttagtttttttagtatttgggattatatttattttttgtttttttttatttttttgtagagataggattttgttatgttgtttatgttggttaagttatttgttttttttggttttttaaagtgttgggattataggtatgagttattaggtttagtttgtttttttttgttttattaagatgtttgatagtggatatataaaatgataattttttttttttatatgtggtattgagagatgggtagtttttattttttataagaaatatagaatagaaaatgtgtaattttttatggtgttttgtaaaaattaaaaattttatagaatatttatttgaatttttggtttgtaattttggttttttaaaatttgtttatatgttaatatgatttataaaatatttgtaataataattttaaaataaaaattttaaaatgaatttagttttatattttttataataattaatatttttagaaaagtaggatttaagagtattttttgtattaatatatgatttttttttttttttttttggagatagagttttattttgttgtttaggttgaagtgtagtggtgtgattttagtttattgtattatttagtcggtcgaaggtttggttagaataaaaaggtagaaaaaaggtgaatttattttttttttgttttggagtagggagttttatatttttttttttttggatattagatttttaggttttttggtttttatatttagggatttgtattagtagttttttaggtttttggttttggatttagagttattttattagttttttcggtttttagttttttagatttggattgagttatgttataggtttttttgttttagtagtttgtagaaggtttaacgtggaattttttagtttttatagttgagggagtgaatttttagtataaatttttatttatttatttatttatatatatttaataaattttgtttttttgaagaagtttgatttttttagtttttaaaggtttttaaaggtttttaaagtttttaaaggttttagtgttggtttgttacgaattttttggtagataatattttatatatggtattttagttttttgtgggaggaattaagtgtgttttgtgtggttttagggggataggatttttggaagtttgagtttggttttttttaggttttgtttagtgtgtttttttttttgttgagtttgttttgtatttttttattgtaatgaattagagttttgagtaggattatatgatgagttttgtgagtttttttagggtattattttatttggggtggttttgaggatttttaatatagttttttttttggtattggtatttggtaatatataaaattttttaaaattaatttgttattataatttatgattatattttattaaaattttatgtagttatatttaagaagtttagttaagaaagaaaaattttttaagtttggttaaggttttgttatttttgaaaattcgtattaatttaataatattgtagtaattataagtttttttgataattttttttttttttttgggagtgggggatggagttttgtttttgttgtttaggttggagtgtaatggtgtggttttagtttattgtaattttcgttttttgggtttaagcgatttttttgttttagttttttaagtagttgggattataggcgtttattattatatttagttaatttttgtatttttagtagagataggattttattatattggttaggttggttttgaattttcgattttaggtgatttgtttgttttggttttttaaagtgttgggattataggcgtgagttattgtgtttagttttttgattattattatataaaatttggatttagtggtatattataatatgaaatgattggagataatatgatttttttttcggtattaaatattaattaagatgaattataaaaattatagtaaattgtattttaaaattaagtttatgtttgaaaaatttggtatatatatattttttgaaattaaggatgtgtttttattgtataatttgtaagaggtgatttggtgaatatagagttatggaataagtgtgtatttataatttagtataaattatatataaagagaacgataatgtattatgcggttgggtatggtggtttatttttgtaattttagtattttgggaggttgaggtgggtggattatttgagtttaggagtttaagattagtttggttaatatggtaaaattttatttttattaaaaataaaaaattagtttttaggtattttagagattgagatgggaggatcgtttgaattttggaggtagaggttgtagtaagttgagattatgttattgtattttagtttgggtgatagagtgagattttatttttaaataaataaaataaaataatatattatgttattatatttattatttaaaattgggattttatgttgatttttatatttgggaagtatatttttaagaattgatttttattagttttgtattgtgtttagtggtaaagttaggtttggtgtttgttttatttgggaacgttaggagtaatggttttattttttgttgttgagggtatagtatgaatttgggtagtattatgaaataaagtaaatgtaagaagattttttattagttgtatttttatttaataagaagatttgattattattaagaagttaatttttttatgtttgggtaaaattatattgatttattttgaggttttttattggatttagtgattattaaattttttaagtataaaatggttatgtgattatttttttttttttaggatgaaaggtagataataatatgtgatttatgttttttaggaaaggatatgttataaattagagaatttgggaaagaggaagtatatgaattaatatgtaggtatatggtggtatgtgtttgtggtgttagttattgggtaggttgagtggtagtattgtttgagtttaggaggtgtaggttatggtgaattgagatcgtattattgtattttagtttggttaatagaatgagattttgtttgttttttttttttttttttttttttttatatatatatatatatatatatatatatatatatatagaaaataaaggagaaaaagaaattgtttttaaatataaaatttaaagtggggttttttgtattattatattttttttttttttttttttttgagacggagttttgtttttgttgtttaggttggattgtaatggtgtgatttcggtttattgtaatttttattttttgggtttaagtaatttttttgttttagtttttcgagtatttgggattataggtacgtgttattatgtttagttaatttttgtatttttagtagagatggggttttattatgttggttaggttggtttttaattattgattttagatgatttattcgttttagttttttaaagtgttgggattataggtatgagttattatgtttagttgatttttttaaattttatttagttgtgcgtttagttttattatatttttatatgaagaagaaataaaataataattattaattaaataattaaatattatttttttttttttatatgtttgaaaatattaaagattttttttaaaattattatagttataaaagagttaatataatattaaatggtaataaattaatttttttatgatgtaaagaattaatgtaaaattgtgaagaaatattatttatttatagaagtaattataaataaaaaattttaatttgcgtaatgtatttttttattaagaagaaggcgattatgatgttttaattttcgttttttttatttatttttatattttgtagtagttaggggttttttgggttatgttggtgtttgataatttttttatttttttttagtagttttagtattttttttttttagttatagaggcgttttttttgatgtattttggttggttgagttttattaggttgttttatttttagtttttttttttggataggggtagggaaaggagtgttggattcggagttttttcgtttttgcgtcgttttattttttttttggggtttggcgtatagtggttattgtaatatattttaaagattgaaggagttagcgtagagttaggatttttttgtgagttatggttttggttgttttgtttagtttttcggaatttgggttattaggggtgagtgcgtaggtgggcgagggagggtgggggttttgggcgtttttggagtttatagatgttgtttttttttttgttttgttttttttgttttttattgttttgtttgaggtttttttttgtttttttttattttaataataataattattatttattgaatattttttaagtgttaaattttatgtttttttttataatattatttttagaaaggtttttattaatataattttagaaatgaaaagattgagatttaaagagatttataaatgtttttttttttttacgttttttcgttgaagagagaagagttagggtttggtaattttttttggagattttttcgtagattgtagaggttagtttttttaaataggagtttgtaatgtgggtttttttttttttttttttttttttttttttttttttttttttttttttttttttttttttttttttttttttttttttttttttttttttttttttttttcgatagggttttgttttgttgtttaggttggagtgtaattacgtgattatagtttattgtaattttgaatttttaggtttaagggatttttatattttagttttttgggtaattgggattataggtgtttgttattatatttggataattatatatatatatatatatatatatatatatttttttttttagagatggagttttattgtattttttaggttggttttaaatttttggttttaagtgatttttttgtttagttttttatagtattaagattataggtgtggggtattatatttagttcgttagtgatttttttttattttatttagtttttaatttattgtatttttttttttttttttttatgtttttgatgttgtttttagggtgatttttatataatttaaattagtgattatttttttgtttttattttttgtgtgttatgagtgtgtttgtgatgcgttcgttttttttttttggatgtttttttttgtttgttgttttttatgaatttattttttttttgttttttttttattttttagtttttttttttttagtttttttttttatgtttgtgtttgtttggatgtaggagtatatatttagatttttgttattttgattttatgtattttttttgagtgatttgatttaaatttagaattttatttataatgagtttttttttagtttgtgttattaatttagtgtattttgggatttaattatttagtttattatttttagattaattttatttgtttttatagaaatttaaattaagtatgttttaaatagaatattttattttttttcgattattttattttttattatttttgtagttattgatgttttagttttttacgttgggtattttggatttttttatatttttatttttggtatatgatttagtgatttttgtggtttttcgttttattattgttatttaaatttattcgttgttcgttttattttatgtttttgtttttgtttatatttttatgattttttatttgatggttgaagagttttattggttttgtttttaaattagttttttttaatttattttttttattgttgttttttttaaatataaattttattatgttattgttttgtttaagatgttttataattttttatgttttgtgggataaaatgtaaatatttgttattagtatataaggtaggttatagtgtcgttcggcgtatattttttttggttttagttatattgaagaattgtagttttttttgtaattttatgtttttttgtttttgagtttgttttttttgttggatatgttattttttttttttttgttttgttaattttaggtaaatattatttttaggaattttttttaaattttattttttaaaaatgttttttttatgtttttgagtggttttagtgtatattttatggtatttagtggtgattaaaataatttatggaaataaaagattaaaaaatataaaataaaatatatatgtagtaatttttttttttttgtttttttggattttggattttaagtagtttgaggataaggtttaggttttttgagttatatttttagtgtttaaagagtgaaaatttataatgagtgtttatttaatagaatgaaaattaatatttgaaggtggaatttgttttaaaatgtacggatttttagttttaggttttgtgaatataataaaaataaagtaatttaaggtgaataaacgatatttttgtagtatagtttgtatattatgttttttatttgttttttttttgggtttcgtttttgtaggtgagtaattttttagtttataaatttagtggaggatttttaatattcgtgtgtgatattgaatttgtcgttatttgacgtatttaaggagaggattggtttttttcgtgttgggtttggaggggaaatttttgtttaggattaataattatgtagtgttatttcgttttatttttttttttaggttggattttatgtttttttatttttatttttttattgtaatagtaatagatttttttgttgttaattttttgttgcgttttatatattaggtaaagttaagatattattttataggtgttttaaatgtaataatttttatttttaggtagaattatatttgaaaatatatatttaataagaatattttgtgaatgttatgtgtatgataatatttttaaatttattatgatttaaaatgaaagtgttttgataaaattatataaggtattatttttattttaaaagtaagaatataatttgaagtttataaatagtattaagatttattttggaggtttttttatgttttttattatttttttttttgaaagatttttattttatttttttatttttttgtttttttttgtggttatattagtattttttatgtttggttttgtaggggttttgagattttatgggaatggggtagggggattacgtaattttgtttttattaggagttgtgtgatttgggtgagttattttatttttgtggttagttttttaatatgtaaaataattttttttgttaaattaagtttagtttaaagttgtttttttatatattttaagtttggtttaaaggtttttttgtatattatgaattataataagtggaggtgtaaatagattatagtttatatttgtgttaattattgagttttggttaattatatgtagttaattgtttgaattgtgtttaagttaggtaaatattgagttgtaattaatttggttgtttttgtattttatttttgttttttgtatgttatttttttttttttgtttataaatttttttttattacgtagttgtgttggagattttgagtatattttggtttgggaggttgttcgatttgtgaattgtttattgcgtaattaattttatttaaaatttattcggttgaagttttttttttattaggtggtgttagaagtggggttggaagtagagtttttaatgatttttagaagtgttgagtgatttagcgaggtattttttaggtttattgtgtttttttttttttcggagtagttggggatcgtggtaagtttttttgtagatttcgaagttttatagatttgtgtgttgagttttttgagtttttttgagtaaatttttgattttgattgggtttgaaagtcgcgaaagaaattgaattgagtttaggatcggattggttttagtaattaattggtttggattcggttagagattttttatatttaattggattagaaagaaattagtattaaatggtaatattgtaaaggtgtaaaatttggtttttggaaatttatagagatttttatgttttatttttttattttttttgtgtatttaggtaggaaaaaaaattattggttaagttgaataagggatttgagagtaaagttagtatttgaggtaaaaaatgtgatattgaatttttgaagaattgagttttttttggattatatatgtataagtattaggttttggaaggagtaacgttttatagaaattgtttaggcgtggtggtttatatttgtaattttagtattttgggaggttaaggtgggtagattgtttgaggttaggagtttgagattaggttggttaatattgtgaaattttgtttgtattaaaaattaaaaaaaaaaattagttaggtatggtggtatgtgtttgtaattttagttattcgggaggttgaggtataagaattatttgaatttaggaggtggaggttgttatgagttgagattataatattgtattttagtttgggtgatagagattgtgttttaaataaaatttttttttttttttttattaaagataatttgtagtagaatattttaaaagaataatattgtattgaagtgtatttgaaaatgagggtttttaaattagttttatgtatagttttatgtagggatgtttattgatatgtagaagtttttaaaaaattttaatatttgtatttaaagattttataaaaaagaattaaaaagtttaaataattaattgatttaaaaaattaaatttgttttgcgttttttgttgatggttgtgtgtgataggattaggtatgtataggattatgggatatggggaatttttttttttttaaagtaggaaatttgagagttgatgagatggttggaaaagattttttatgattgataagtagttgtttgaattttttttttttttgaaacggagttttattttgttttttaggttggagtgcggtggtataattttagtttattgtaattttcgttttttgggtttaagtgatttttttgttttagtttttcgagtagttgggattacgggcgtttattattatgtttggttaattttttgtgtttagtagagatagggttttattatgttggttaggttggtttcgaatttttgattttaggtgattcgtttattttggttttttaaagtgttgtgattaaaggtatgagttatcgtatttggttttgaatttttaatttagtgttattgtaataggtgggtttttttttgttttttttgaattttttgttttttttattttgttgtagataatgtttttttttttttttttttttttttttttttttttattttttttttttttttttttttgaaacggagttttgttatgttatttagtttggagtgtagtggtgcgatttcggtttattgtaagttttgttttcgagggttatgttatttttttgttttagttttcggagtagttgggattataggcgttcgttattacgtttggttaattttttttttttttgtatttttagtagagacggagttttatcgttttagttagaatggtttcgattttttgatttcgtgatttgtttatttcggttttttaaagtgttgggattataggcgtgagttattacgttcggttttttttttttagttttttattatattttgtttagagattatatgttgaaatttttggttggaggttattttattttattttgaatagattaaagatagtagagttttattaggggtaagtttaagttttattagtttaatattgggtattaagtagagtggttaatgtttatgttttgttatatgtattttgttgtggttggaagggaaaatgttaatttagtttttttatgtaattttttgggtagtattttataaaattgagaggtttttgtttatggttttttgaaattagaaaagatgatttttttttgtgttgtggtttggtttttaggttatgtgtagttaatagggtcgttagggttatttagaaagagggaatttagaagtttggtatgttggtaaaagggtaagaattttttagtagttaggtttttggtttttttttgtgtggaaacggttgtaggagtagtaaaaattattgttttttttgtaaagttttaattaatgataaaaaggatttgtgaggttgggtgcggtggtttacgtttgtaattttagtattttgggtggtcgaggcgggtggattacgaggttaggagattaagattaatttggttaatatagtgaaatttagtttttattaaaaatataaaaaattagtcgggcgaggtggcgggcgtttgtagttttagttattcgggaggttgaggtaggagaatggcgtgaattcgggaggtggaatttgtagtgagtcgagatcgcgttattgtattttagtttgggcgatagcgagatttcgttttaaaaaaaaaaaaaaaaaaaaaaaggtatttgtgagttaattttaagttgtagtaaatttggtgtattttgtgttatgaattggtttttttgtgttatttggttataaaaggggttaaataggataaaatgtgggtttaggatttttagaagtttgttgtttaagttagtttggtaaattggttagttataaattgcgggtttttgaaataaaaaaatattggataaggtttttttgttattttgttttatgttattgggagtttgattttataattatatgatggtatttttttttggtttttattttttggaggataggaattttggagtttatgttatagttagttttaaaaattattttgagtagttaaaagtttttgtaagttgaaaattggttgtttttaggtttttttttttgggaggaataatggaaattattaacggtgtagtttagtggttaagttttgttattttatgatggtagttaggtagggtttaattttagtttagggaatgagatttgtttggtttgatatttttttgatttttgttatttgttgatttttttttttttatgaataatttttgattttcgttttgaatttttttttttttgagttacgtttggaaattttagagtttgtaaaaattgtttgttatttttttgaaaatatttcgtatatttgtggttaagttataattttgttaaagtttattggttttatttgggagattatttttggtaaagtttaaaagttagatatattggttgtttggtttggttaaagttaagtaataagagatttaaaatgattattttaggttgggcgtagtggtttatgtttgtaattttagcgttttgggaggttaaggaggatggattatttgaagttaggagtttgagattagtttgattaatatggagaaattttgtttttattaaaaatataaaaattagttggatgtggtggttcgtattggtagttttatttatttaggaggttgaggtaggataatcgttttaatttgggaggcggaggttgtagtgagttgagattgaattattgaattttagtttgggtaagagagtaagatttcgtttttaaaaataattaaataatttttttttttttttagaaagagcgttatagttaaaagttagtttaattaaaagtggatatttaagttataggtatgtttaaagggttttttggttttttttttttttggatttttgtttttttttaattatttttttttttttagttaattgaattgtttttttttattttgtttttttgttatttttgttgtatatatgagaggatttaaggtaatttttaatagtttgggattttttgggaaaaatagaggaggtattacgattttgttttgggatataattcggttttttttttgaaatattaggaattaaaagtagatagattttttttaaaatttaaggttaaatatttttttggggatggttaatagggtgaaatttagtttttattaaaaatataaaaattagtttggtgtagtgttgtatatttgtagttttagttattggagagtttgaggtatgagaattgtttgagtttggaaggcggagttgtagtgagtcgagattgtattattgtattttaatatgggtgatagagtgatattttgttttaaaataaaggaaagaaagaaagagagagagagagtggaaggaaggaaggaaggaaggagggaaggaaggaaggttatttttatagttaattgtttaatgttggtgtaatttttgaaaattttataagtaggtataattttagaatatggtgttttttaggaggtttttgaaaggatggaaaggattttaaaaagtatttttgattataggtttttgataattttagaattatattatttttattgggtaagaatttttggagttttttttttttttttgagacggagttttattttgttatttaggttggagtgtagtggtacgattttggtttattgtaagtttcgttttttaggtttacgttatttttttgttttttggagtttaaaagattgattggtttataaaattgttattttaagtagaatataaattaattgaatattaagaaaatattttgtaagttttttatgttaaattatttaatattgaaattgtttagatatataatttgaagaaattttgtggtttaatttaaattatttatgataatttattagttattagtgttatgtattttaattggagaaataatcgtgttaagtatggatttatggagaattaaggtggttgttttattttttttgagtttttaaagtttttataatttaaagttttgtattttatgatttattatggaaaagataaaatgatttaagttaaatgtatattggtgtggtgatttttaaattgttaaaatagtttatgattaatgtttggtttgttaaatttatatttttgggaagataattaaagttttaggtatattttgttattttatgagttatttaaatatttatgaagagattttagttaattgttatttttaatgtatgttttttggttgtgtaaaagtttttttatataagtgaattgatgttataatagtagattattattttatagtgtatttttattaggtaaagaaagttttttatggtttattgattgaggataattaatttttttataatttagaatttgaagattggattttttgagaatattagagaaagattgtttttgttatttatattgtagtaaatattagaatcgtgaattttggttttatgattttataattgagaaggatttttttatatttttggaaatatatatttattggaattcgtaaggtaaagttaattagggaagtttttttttagaagaagatggtatttttgatgtgaatagtttttattaagattatagattaagatttttttgttatatggaggtttttatttttgagtatttttttttttgttgatgtttttatgaatagtagaagtgaaaagggggtttgttgtgtgtatttatggggtaggtatatttttattggtgaagggttttgtagttagttttatatatggataattttatattttgatagatgaaagatgaaggtttagtgtaggtgagaaattttaatggtatataggttgttttataattagttagaaatagaatattgatttatttttttattttatattatgggttaaagagaatattgttaggaggtttttagttttttagaagggtatttttttttaggttttttttattatgatttggagtaaaataggtaatgattagaaatgtattttttatgataggttttaaatagagtttattgtaagggcgatggttatataatagattttatatttttttgtgaaagttatgtttaatagtaggattgttgtagattatttattggttaaatagagaagtatttgtgtagttgttggtatttgtggtttatggagaaatatattacgttaggtgtatagagatttagttgtaggtaattaatgaagagattgtttaaatgagtaaattttttatttagtttattttttgatttatttaattttgggtggtttggtttatggggattttgtgtaaggagtatattttaaatttttggtattatttttttgatagttataatagtagtttatttggtgtattgtattttttcgaaagttttaaatgtttgtatgtagttatttttagaatgttaaattgtttttttttaattagaatgataagattgaaagaaatgtgtgattatgatggtattttaatttatgaatgatgtgttgagattggaaatttaaaatgatggtaattgagagtggcgttaaggttttaagttttggttatatttttatttaagtgagaatttgattaaaaaggggatatttttaaataaaattatgggaggttattgttttggattttaatgaaaggttaaatgtattaagttttaatagattagattaaattaaaatggagttatttgtgttaaatgtgatatgattaaattaagattttaaggaaatatatagattttaaaatagattaggttttgttttttttttttataaatagaacgttttaataaaaggaggtaatttttataaaaataaaattaaaataaaataaaataatttgaaatttttgtttttttttataaaatttattgttttgttattttttagggggttttaagattaaataagtatatttataatggtgatagtggtatcgatgattaaagttttggtaaatttttaaaaattgagaagattattaaaagaggaaaattgttaaattaagtttagtttaaagttgtttttttatatattttaagtttggtttaaaggtttttttgtatatcgtgaattataataagtggaggtgtaaatagtttatatttgtgttaattattaagtttcggttaattatatgtagttaattgtttaaattgtgtttaaataaggatatatttagttgtaattaattgggtgtttttgtattttatttttgttttttgtatgttatttttttttttttgtttataaattttttattatatgtttgtaatggagtttttgagtttattttgtttcgggaggttgtttgatttacgaatcgtttattgtttaatttgatttttttatattgaatttagttgaagttttttttttttttttttttttgtttttttttttcgagatagagttttatttcgttatttagtttggagtgtagtggcgtaattttagtttattgtaatttttttttttcggtttaagtgagttttttgatttagttttttaagtagttgggattatagatagtatgtttggttaatttttgtatttttagtagagataaagaggtttagtagagataaaggggttttattatgttggttaggttgattttgaatttttgattttaagtgaattatttgtttcggttttttaaagtgttgggattataggtatgagttatcgtgtttggttagaagtttttttttgaatattttttttttttggggaaggagtttcgttttattttttagattggagtgtagtggcgcgattttagtttattgtaagttttatttttcgggtttacgttatttttttgttttagttttttgagtagttgggattataggtatttgttattatgttcggttgattataggcgtgagttatcgcgtttggttttttttgaatatttttacgtggaagtgtgaggatttaatgaataagttgagtatatggtatatgtttagtgaatattttttgattgtgtttagtgttattattattggaatgatgtgagggttgtgtaagtttttagagattagggaaataattgaaattttttatgagttatttttattattgtttatttttattttttttttttttatttatttttgtattttttattttttgtgttatttttttgtatttttaaaaatttttttattatttgtttgttttttgtattttgtgtatttttttatgtgttttttattttgtagttttttttttttttaagtagtagattatgtgttaacgtatgtagagtttgtgtagatatatagattttttggggagtatatgtttgaatttgatgaagatgagtagttatttgtgtatttggataagaaggagatggtttggtatttgtgagagtttatttatattgtgaggggtagaaaatgaagggattagggatggaaagggatgggggataaaatattaagttggtagttttaattttagtgtgtttattttattttaggtgttaaatttttttagttagaagttgatataaggaagttattagtttcggttttttttaaatttttaggtttaatttttttttgaatttttgttttttaattataatgatttatgtattttaagatttttttattttttggttgtttatgatttttttgtatttagtatttagtaaagggtttgatatttagatagtatttaattaatatgaagaatttaaagtgtagtgataaggtggtgtttatattggatggtttgtatgttgtggttttattagggatttttttttgtattgtattttttttgagaaattttagagtttaataaatatttgtgtatgttagagttagatatatttgatgtttttttgtgattttttatatttttagttttttaggaatgtatattttggatttgtaattgtaggatataggtgtattatgggtgtagatattttagttttgtattttgtaagagttagtttgtagattgtttattttattttgggtacggttgatatttatagtatgcgtttaggggataaaaatggaaggagatgattttgattggatagtgagaggaatacgggtagttttggtaaattgattagggataggcgtttaggggtatataaggtttagaagttgtttgtgagaagttagggagaaggaagttaataattggatgtattagagagttattgagtgtttattatgtgtattaggagttaagaatttattttttatacgaaaaggaaagtttagattaaatatgttttttattttgatttatagtaatttaatatgaaatgtaaaatatataaaaattttggattgtaaaaaaaagattagtgtttgaaagagtgttatatttattgttttgtatttttaataatggggaggcgttttttattgtatgaattattagtttaggaggtttaggttggtgaatgaatgtagatttagaggataaatgtcgtttatttgatgtatttaaaaggttaagtaatatttggttaaggagtatttgtgatggtatgtaaagaaagtgttgaaagtgtgttagattatatttatcgttttaaattttgatgtttatttaattttttaatagtaatgttaaaatatgtttttagtaagttatatgttgaattagtgttatgttaatatgggttttataatatagatttgtagtttgtttattattgaatagttaagaatagtggttttagatttaaatggatgaagatattaaatatgaggatggggtagtttattgaaatatagtaaatttaggagaggtttatgtttaataggttattttatataatagtttggatggatttttatggttttttttttttttatgtttaaattataatgaatttttttattaatttttattgtttgttaaaatttttaagaaaaaaaagtgatgagatatgatttggtgtatatttttaatagaaaataattatgttgggttttgattatttatggtattaaggagaaaggaatttggttggaggttttatgagagaaattatgtattgaatttaggaatagaatgatagaaattggttttagtgtaattatttagtagtagtatttttttgggaggttgggggtttgttttcgaagtaggtattgggattaaagaaatagaaaatgtttgttttaaggtatattagttttttaggtaaggttagtaattttgtggaggtaaaaaatagtaattttaggttgttggttttttttttttaagttttaggagagaaaaataacggtgagaggttgaattttaggttgataaagaatagagttgatttgagttttttttagtaatggagttatgtaatgttttttttttatttattttagggttgaggttgaaataggggtttaggtttgagattttttttttagaggagttttagtgttataatgtatagaaaggatttatgtttttttgtaatttttttaataaggaaattaaagtaggaatattgtttgtttatgtagatttttgttgaattgaaatgaaaggaagaaagagaatgtatttagttattgaaattattttagataattagagaaacgtttttattatatttttattgtttattatttaatggacgttttgtaggagtttgagtaattgggattttatgtatttggttgtattaagatgttaggttgggatttttttttttttagaagttgtttttgttttttgattatgtgattttagtaagttttttggtattgtttttttgttttagttttttattatggaagaagggtgagtaagttaggagaaaggtgggtatcggttattttataggattttttatttttttttttttttttgtgcgtgaagatgtttattttatagatgatgagttttagtatgaagtttttggtttttgttagtattttgttttgtatagaattagattgtgtttttaggaagaataggtttaggtttagagttatttttagtagttgtatttttgtttatgttttgtttgagattttgtagtttgatgtagaatattggtacgaggagagcgaggggaatatattttgtatgataggaaattgagaaatagttatttttttaattttagaatagagggtgtgattttaataatagataaatttagatttaattagttgttttttaaaataatttagaataagttaaaaggttgaaggaagataatagtttttatgtgtaacgttagtttaggaaggtgtttgtatttttagatttttggataaggagaggaattatgaatttttaggattttttaggtcgggggtaggtaagtttttattgtttttaggttaaaattatatttagtgttttttatagaagaaaaatggggtcggatatggttttagggtatagatatataaaattagatgagtggattttagagttagagagttttttgttttttagaggtggagtttagagggttattagatttttattttattttacggtgataggattgtttaggttggggtgttttatttggtaggtgtagatgtttttttgttggggggttatttttagtatttttaggatttggaaggtttagtttttattacggattaggttggtggatacgattttagttgtttttttttgtttatttaggaagtatcggatttgaatgttgtttgggtagaaatttgttacgtggtagataagtaggtcgtggtgttgttggggtttttttttggaggggagatgtttattttaggttggattaggagtggcgaagtggaaaagtggaatagtatttgagattattattttttagatatgtttattatggaattgatttttagatgttgaaaataggaatgatggttaggcgtagtggtttatatttgtaattttagtattttgggaggttgaggtaggtggttcgagattagtttgattaatatggagaaattttgtttttattaaaaatataaaattagttgggtgtggtggtgtatgtttgtaattttagttatttaggaggttgaggtaggagaatcgtttgaatttcggaggtagaggttgtatgagttaagattttattattgtattttagtttggataataagagtgaaattttattttaaaaaaaaaaaaaaaaaaaaaaaaaaaagtaggaatgatgtgattaggttagtagataaggggagtattgaaattatagaaatagtattgagaagaataggaggtatataaatttattagtttgtagtatatttaaaagaaattttatttattagttattgattaatagtttttggataaagaatatttaattagtagcgatattattttattttttgagtgttttattttgatgtaaaagatgaaaaatttgtttaaatgattttttgaaattaatatatatataaataatatttttatggtttattaatttaataattatattttataaatatattaagaaaataaagtgagtttgacgtgatttattttgtaagtaatttatggattttttggtttcgtttataaatatttaaaatcgttttatttatataatattttgagtttttatatgtttaaatagtagaaattttatttttttttttaagttttttttttgtattgtgttgttatatttattgaggtttttagataattaggtgttggttgtgttttggtatttttttatttttgttttttttttttttgtcgtttatagattaatttttacgttattatttgtagttttttttttggattttagttattagtattttttttttttatagaaggtagaaaagggttaattgtttttagagaatagtttaattataggaatgttttaaattagagtttttaggtttttatttattttgtttttgagaatataaatatattgatatgggtttgggttaggtaaatgaatagtttttaattaatttttaatttttattttttatggtatttttgttttgtgtttaggattatttatatttatagttttttttttcgatgtgattttattttagaggtatttggttttcgttttattttaattatttttataaatttaatatttattagattggttagtttatgtttgaattttaattgtagattaagtggaattttttttttataggtgttttgggaagtatgaaagttatgggatatatggttgtttgttttaaggttttagaatattttatgagaagtattttgttttattttttttgacgggagttggttagtttggagtatattagagatttttagggggcgttgtagttaaggtttgatatttagtggttttatttttgatttagtttaaatatattttattaaggtaaggatttttgtttgttttagttgtttttgtttagttaattttagatttgggtgggtatttatattggaatggttagaatttttatttttttttttttttcgttttttttatttttgtgtttttttttattttaatttatgtttttattatgatttttttggataataatagtagttttttattttatttttttgtttttggtttttgttttttttaattgattttatagttttttgaaaatagatttttagttttgttattttttttttttttttttttttttttttttgagacggagtttcgttttgtcgtttaggtcggattgcggattgtagtggcgtaatttcggtttattgtaagtttcgtttttcgggtttacgttatttttttgttttagtttttcgagtagttgggattataggcgttcgttatcgcgttcggttaattttttgtatttttagtagagacggggttttattttgttagttaggatggtttcgattttttgattttatgatttattcgtttcggttttttaaagtgttgggattataggcgtgagttatcgcgttcggtttttagttttgttattttaagatttttgaagatttttaaaaatttttagtgttttgatatttatttggttatatgggaattatttgggagttgattaaaaatatagatttttagatttttttatttagggaatttgaatttttaggtagtgagtttgggggaatttttgttttatagaggattttaaggagagttttttgagtagtgaggttggggatttgttggtttagaggagaaatttatattttttagtttggtattagggggtttttgtaatttggtagttgattattatgaaagaaaatgttgttatgtcgttgatttgggtttttatgaagttttagtgatagattttgtaaattgtattatttttatttggatattttttttaattaattacgttagtaatttttttaaatttatgttattttttttatttttatttaatgtgtgtatttttttttttttattagatgattttttttttatttttttaggaatagagggattaatggtgtgattttttgagttttttttttttttttttttatttttttttttttttttaggataaaggtttttgtttagtgagaggtttattggtgttttttggttttttttacgggattttttttttggttaaattaatatacgagttattaagagattatttttaggtagttaaaaagggtaaaagttttgggtggaatttttttttaataaaaagtagttttaagttattttttttttaatagaaagtagtttgaaaatttaggtatagatatgtaaattagaagtttttatgtaaatgttggtagttgtttttggaagttaggtaatttaatatggttatttttatttttttttttttttacgtttataggtgttaaggtagtttttaggttaaagtacgtgtataggtattatggtcgttattaggtggaggtcgtatttgtataataaaatattagggtgggaaggttagtttttttgtaggttatgtaaatgatatatttggttaaattaattttttgagttttatgtaaattaattattgtttttttaagtttttgtataaaattaattgttttttattagaaataggagatttttttttgggtgatttgttttattagtattaggaagtttttttttttattttttttttttattaaatttttcgtttttaaatttattttttgtgtgtgttcgtgttgtgaatttttttcggttatggtaaagaattagggtatatattttagatagtggagttgttttattttgggagtttattcgggatttaaattagaatggaagatagaaatatcggagtggtgagtatagagtaaacgttaaatttgttttttaattttaagaatttttttatattagtttttttttatggagaattttattatcgtatgaggttgggaaagttttggggtaattgaaaatttttggttagggtatattttggtgttatttaaaggtttttggattgaacgtagttttcgatagtttgtttaggtgttggtaatggatttttagttaattcgttgtaaaattttttttttttttgtattcgtggttattatgttttttgttttttttttttgtgtgtgtaatttgcgggaagttttatagtttagggaaatatttttgttagggaagatcggtaaatgttataggtagtaattgttattttttattttttttggcgagtatatggtagtgttaagttaatagtattatttagtggaaataaaaattttttttattaggtattttgtcggttttttatcgtaatattgtcgtttttaaattttttcgtgtcgttagaaaagttttttttgtgaacgagaaagtattgtttttaatagtttggagtaaaatgttttttgtagtgaaattttagttttgatattgttttattagtaggaaaaatagttattaggtttttacgtttattttcgtttttaattaggatagtatttaattagtaaggggattttaggttcggaagttaattagagttattttgttaagggtaaatgttttagtatgggtcgtaatggtaggtaatttagtatattgttttcgttaaaggagtttatttaaagatgatatagtttttttggagatttatttttttgggagttaggtagattatataaatttaggacgttaaaggggattatataaggtggataagttaaggttgtgtgggtaaagtatggttaattttattatttagtttatttagttttacggtttggaggattacgtttataattatgggtggtatatttaatacgttgttaggatttaggaattaaggagagaaaatagtagggaggatatttttattgtttttttttttattttgggttataatgaaagaatggggacgaaaggatatttttatttttatttttttttttagatgggtgatagattagttttagtttgtatttttttggagtgtattttgaaatattggaatttttttaattttaggattttgaagagaaaagtgatttatttttttttgtataagggtatggtttttttattaaatttttgtaagtattgtaagattagtttagttttttaaataggtatattaggtaggtttatagaaaataattttttagaattagaaaggtaatttttaagggaattatttgagaattttttttatttagggttgttaatatgggggaagtaaagagaaattagattgttgttgtgtttatgtagaaaaaggaagatataagaaattttattttgatttgtattaaggaaaatttttttgttttgatatgttgttaatttgtaattttagttttaattttgtgttcgtagaaaatttgtgttgtattgatttaaggtttaatggatttagggttgtgtagggtgtgttttgttaaaaatgtgtttgtaggtagtatgtttggtgaaagttattgttattttttagtttcgagtatttagggatataatgtattgtggaaggtcgtagggatttttgtttaagaaagtttgggtattgtttaagggttttttttattgagagagatagtttgagatatggttttgtgggaagggatttgatttgatcgtttttaaggttgatttttataaagggtttgtgttgaggaggattagtgaaagaggaaggtttttttgtagttgagataagaggaaggtatttgttttttgtttatttttgggaatggaatgtttcggtgtaaaattcgattatatattttatttattgagataggagaaagtcgttttatggttggaggtgagatatgttggtggtaatattgttgtttattgtattgagatgtttgtgtaaagttaaatataaatttggtttatgtgtatatttaggtatagtatttttttttaaatttatttatgatatagagttttttgtttatatgtttttttgttgattttttttttattattattttatagttttgttatattttttttattgagatgatagagatagtgattaataaatattgagggaatttagagattagagtcggtataggttttttgtatgttgagtattggttttttgggtttattgttttttttttatattttgtttttgtgttttatttttttttttagtttttcgttttatttgatgagaaatatttataggtgtggaggggttggttttttttaattttaagttttttttttattataggattttaggtaaataaaggaagatttatgttaattttttgataattttaataggtatatagaagttgtttagaatttaatttaggtgttttattttatatggaaggatgttatgttgtttttaaattaaattttaatcgtagttgaaaagtaggtagttttgtaggtagtagataattttggagatgagtaatatattttttataatatattaaaagggaagaaaagagatagggaaagtgaaaaaaataatagaaatattatttttagtaggaagggaagtagtttttttcgataattttaattgggattttagtagttttgtaaatgaatagaaatggaagtatttttaaaatatgtatattagagggtttatgaagaattaaggtttgattttttaattttttttaattgtttatgatagattaaaagttagatgggaattttgtagtttttatggaaaggttgagagaggtattaatagagtatatttttttagtttttaatttagttaagggatggtttattgtaaagataagtttattatataggtagtttttgatattagaaggaaattgtagaagtacgttataggattagatagtattttggggaattttttgagggtggttatttataatagggattaggaggaggttttttagaaagagagaaagtttaggagaaagatagaggttttagtagtagttttgtaagtttgtaaagtttaagatttttgaggtgtattcgttagttgttattagtgtggtaagttagggtattttaaaaaggagtgtttaaatagtaagaggaagttattttaattttatttagtttgtggtggagattattggaaattaaattgttttcggagacggaggttattggagttagaattagttttatagatggtttagtaggattgatgggttttggggtttaaattttagttttagtggtttaaattgttattatagtacgggagttattaggtgattttggaaattgaaggaaggaaattagatttttttttaaatattcgagttagtttttttttttttttttttttttaatttaggttttttttttttttatagcgtgagtgtaaggggtgttttaggaaaaattttattttaatattttttttaattttttaattgtagttaggaggatttattgtttatatatgtttttaagttattgttacggtggttttattagttaaaaaagtttttaaattaattttaggaaataatttaattgtttatattttatataatgtagtaggattattgttttttaggggagattttagttaataaatagtaggtaaagtaagaaatatataaggtaggataagtaatagttattttaatgtttttttttagatataagtatttaattagttgaattaatagtttttgtaagtgtatttaaattaagtaggggaaagatagttaatatttttattgattttaagtatgtttttttagttttttatgtttatgttgttatttaaaaggaaagatatttttttattattaaagtattttttataaaatattattaggaaattaataggttattatttttagttttttttttacgaaaaatagtagtaatgtattatagggaatattaaagaggaatagatgaagtagttaaaggaaataggttagttgagtagggagttaagtaggcggtagggaagttttaaggtattaatatattttaagtttttttaatttcggaagtttttataaaagaaattaaattttagtatttttttgtagaaataaaataagttattttttaagggtattttagttttgaggatgataaattttatttattggtttttagttaatggaaagtttttaaaattttttattaagtttttttatataggaaaggataaaatttattattagtgtgtttagagattgtttttaggtagaaaatttttaagttgtttaaaaatgtaatttttttagtttatttttaatagaaattgatataattagttaaaggttaattttaggaaattggattattagaaaatttggtattggtgaaaatttatttttttttttttttttaagttaggttgggaagggttttatataattttttttttaatttttttagtagtaaaagttataagtattaatttttgaatatattatatttaagttaaagtttgaaaagttgagggagtaatttttgatagtttagaggaatattttgaatattaatgtggagatatagaagattttaagttgaaaattataaaaggtaagtaaatgagtgagggttattcgttttagcgttaattttattttattaggtattttttattatttttatttttttttttaaaatttattgtttagtattagaatttttttttaatgtatatttgtagagagattttaattatatatgggattgtatttgttattttgtaaatttttaaagggaaatattatattttggtaagtaaagttttaaatggaaattatttattacgttatttttgtgggaattgttattattatgttgttatttgtaatagaattgtatattgtggtatttataatgtggaattttggttgtaaaattttaatttttgtaatattttgtttaattattatttttatgatagaattaataattgtaggaaggatttggttaagtttgttttgtttatagtaggagtaatagttatagataagaagtaagtatgaaaattttattattattaagtttgataggatttttttattgaagattggtaaatggtgtattttaagttatggaaagaaggttataaataaagggattttatataagaaaggattttgtatagtaaatttttgttttaaaaggaaatgattggttgtttaagataagttagaaagttgagtatattgtaagagggtttgtgaaagttatgaaagaatttaataattaagaaatttaataattaaaggaaaggaattgttaagattaatattaaagttattttagttatttaataacgttttttttttaattatattataagttataaagaatggtttaaattaaaaattatgttttaatagtaagttaagggggaaatatgtttttttaaaggaaatgatgtttttatattaacgtttttggtaatgtatagcgatatttagtggagataaattagtattataatttattggtgtaataggtattaaattttattgttatagttatagtttataggtggtaattttaatatttatatggtaattttatattttaaatttttttgtaaaatttatttttttttgtttagaagtaattaaattttaaatggtgttgtaaataaagttatatatggatatgttatttttttaagaagttttagattaattttaggaggagttttaattgtagtttttcgatacgacgtttttttttagtaggaagtagttagaaagaatcgtcgtttaatattttttaatagtagttatggttacgttttttgagggaggaaataatataggagttattaagaaattatttttaggtagttagaaagggtaaaaatttttagtggaatttttttttaataaaaagtagttttaaattattttttttttaataggaagtagtttgaaaatttaggtatagatatgtaaattagaagtttttatatgtaaatgttggtagttgtatttggaagttaggtatatttaatatggcggtttttatttttttttttttgttattacgtttataggtgttatggtagtttttaggtaaaattatatgtataggtattttgtttattattagttggagatcgtatttgaataataaaagattagggtgggagagttagttttttcgtgggttatgtaaatgatataattggttaaattaattttttgagcgttgtgtaaattaattatcgtttttttaatttttgtataaaatcgattgtattttattataaatcgtagatttttttttgggtaatttatttttttagtatgaggaaggattttttttttttttttttttttattaaattttttatttttaaatttattttttacgtgtgtttgtgtcgtgaattttttcggttatgataaagaattagggtatatattttagataatggagtcgttataaaattataatgtttagtttttaggatttagttttatgtttttttcgatgggttttttttttttgggtggttttatgtaggttaggtttttttttcgttgtaaattttttttttatttgtttattagattatttatttggttttttaagtattttaaattcggttatttttttgtaggttttttttttgcgtggtttgttgtgttatttttatttttatttttatatcgtatttttgtacgatgttttgtggtttcgtttttttttattttatatgtagttagttgttaggtttgatgaagttttaggggtttttttttttttattttttttattttatgtttagtttaattttcgtgtttatttttttgataagtttcggttgggttttttttattaatttttagtttaaagttttttttttttttggtattaaggttttttaggtcggttcggttgtttttattttttgggttcggtttttacggttgttttaggagttttggtttatagtttttatttcggcgttgtcggatgagtggttttattagttcgtatttgtgtttgtatattttgtttatttcggttcgttttcgttttataaagtttttttggttattgaagtattcgtttatgggtcgttttagttttattattgttaggaatttttttattgcgttgttaaaatgtacgtatttttttcggttgtagatgagttcgtttataacgcgttgagttttattgaacgtatagtatttttgtcgtttttggtagacggaattttttgtgaagagtagggagagatgggggtggtgttatttttaataatatttttttttttaatattagttatttttttaaatttttttatttaggattggatttaaaaatacgattttttttattatcgagttttgtggttttaggtaggttatagattttaggtattagtttttttattacgtagcgagaggatttattgaaaagaatgagatttattgtttagggtggttgagtgattattagggaggggcgtacgttgaagggaaagtagttttttttgttggcggttggaggaggagggggagatattttacgttttagggaggagtagaattttattagggggagggttttttaggtagagaaatagtagggataggaggagttggggatttggagggtagagttgttttttttatttaattttttgtttgatatttttattttgatgttagttttggtttaaatgttattttttttaggaagttttttattttttttttttttttttatagttaggtttttttttttttttgttagttttttgagaatattttaagttgtttttgttgttttgtatgttggatatttttgtatgttggaaatgtagaaatgtatttttatgtattttttttttttttttttttttttttttttttttttttttttttttaatggagtatttttttttttttttttttttttttttttttttttttttttttttatagagtattattttgtcgtttaggttggagtttagtggtgtaattttagtttattgtaattttcgtttttagggtttaagtagtttttttgttttagttttttgagtagttgggattataggtgtgcgttattacgtttagataatttttgtatgtttagtagagatggggttttattatgttggttaggttggtttcgaatttttgatttcgagatttgtttttttcggttatttaaagtgttgagattataggcgtgagttatcgtatttggttagaaatgtattttttaaaattttttgaagtttgttataagaaagattatatagtttgaaagttaatttttatttttaaatatggttgtagaaagatttgattttaaaatatttggaaaatattttaattaatgaaaattattagaataattagaaagttaagtgattggatttttttaggtttagaggtattgatggtgttatttttatataaagaaatgtggtagttttttttatttgtagttttttttagggagtattatgggtagtgttcggtaggtgtatgtgtatatagaagtagtaatgatttagtatatgtttgagtttttttagatttgatttgtttttggttatagtggggaaattaaggtgttgtgatttgtatatagtaaattaaggtttgttttggatatttgttttatgttttataaattagtaatttacgtttattaattttattttttatagaagatgtatagttggtggtagaggatagtagagaaggggtggggttgggtatagcggtatcgtagattcggtttgtagtttttagtgttatttttaaggtaagattttaggattttagatattttaattcgtttttttttttagtgttttgggttttagttttttaaatatttaggtttatcgtttttagtttttttagtttgtttttttttatttaagtgttttattttgagtgtgtatttttttattttaatttgttagtttttgttttttttttttatttattaataagagaatatgttttagttaagagtaagaattttaaaatttttttttgtaatatttaattttttaaagggaattttatttgtaaagtagatataagtgatgagtatatggtggaatttgaaattttattttttttttgtatatggaaaattttattttgtttgcggaatttttgataattgagttatttagagtataatttgaaaattaatgatttgagtgaatttattttttatttagaataggttatattaaaatataattgtagaaagatataatggagtttatatgggtaagaaaaggaatatgttataggtagggattttagtttttgtattacgattgattattaagttattttggataagaaataattttttaattttttattttttgaaaggtaaaatagtaataatattatttattttgtaaaattgttgtgagaattaaatgagtttatatatgttaaatatatagtattgtatttgttattgtttaatttattttagttttttttttttttttattgtgtgatttgtttgaataggagtaaaattttaaataaatgtatatgaaagaggaattggattagtttatgagttattggaaaattttaagaagattttttatgggtattagattttaatggttgaaaagtgtttgttggttgtttgttgattggattttttttttttttttttgtgttagggattttatttgaggagttagattaatagaagagtgagtatttaaagatttaaatgtataatgagtttttgtaagtgtttagttggtgtgataggaggattcgggagtgtggttttaatgtttggggtagtgggtggggtgaggtaagaaatttagttgtaaaaagtttattttaaagtttgttagagataaaagggtgttgtttttaggagtttggtttttttatttgtcgtgttattttttgttttttaggtgttgttttagttaagtttttttttattttttttttttttattttaagttatagtttggttttttgtgtttttttttttgtgttttgaggatggagatgtgtgtggagttggaagagtatgtagggaattgtggaattggttttgtttattttatttatttttttatggttttagttttttttttagtaggttttgattggatatttattttatacggggagttttggtaatttattttcggtttttgttatatggttttattgttttattttattttttttattaattttaatttagtttttgttcgtttatttgtttattgtttattattattacgtttttttttgtgttttttgttatttcgtattttgagggtttttatggcgttttttaatattattttttattttataaataattttgtttatggatattgttgttatggattttttgttggatattgtttagtgttattagcgttgttttagttttttttttttttaattttatttttttttagtttttagggttgagttattttgttggttagtttttagtatttttgtgattataagtgtagtttgtttattttttttcggataatgaatttgaggtaataggtgaggggttttggggtttgaggggttgtttttaggagattcgaatattgttattttggaaaatgaggaggtgatatgagaatagtattttttaggggtgttttaggtggatgtggaagggttttagagggagggtttatgtagaaaggtggaagttagtggaaaattaagatatttattttgtagtttttttttttagggtgttggtgtaaatttggattagaaaagtaagaatattttgagagaaaaataatgggttatagaagttataatattatattagttataaggagatagtaggagatagaggttttttttttggttattgtttttttggttgtttgataatttatatttaattttttttacgtatttatatatttttattttatttttttgataggttttaatttattttaatattttaattaagttttggggaggttgggagaaatatttttaataagagtgtttttaggggttcgaatttgttttttttttttttattttgtttttattgtttagggagtattggtttttgttttattttggagaatgagaggtattttttgtgagtattgaatttttagtgatatttgtagtttggatatattagttaagggttttttgtttgagtttttttaaggttggatgtagatgtgagtatatttaggagtttgtatttgttaatttttttttttgaaattttgtttgtttaaggttattttgaattttttggttttatttttttatagataagtaatttgatttttgagtatttttttttatttattgtgtttatgtttttggagagagaatagatttggtggatagtaatttattttataggaggtgagtttgattttttagttgtgatagaaggatattaggtcgtggtaggagttttatatgttgttttagagtttggttttataaagagaaagttttttaggaattgttttttgagttagattttttaggaatagtagttttgtttttatttggagtggttttgttttggattatagatatgagtagtattattagtaatgttgttagagttattgtttaggggttttttgaaatttgtaggattattatggagttggaaaaggttggtagaatgaagagagttgtagttaggaaaataagaatttattaaagggagtttttgtttgaaatattagagattatgaatttaagtagttttttgtgattttaggattggatagattttgagaaaagaattaatgggtattgagttttgtatgagttattgtttattgggtagaaagttagtattaaagatttgataatatagagttagtgatgttgttacgaggatagatggagaatattgatatttattttaattagttagagttatgagttttggggagatgatgtgttttttttgttttgaaggtgattttagatattttgttggtttatttatagggattattatttttttaattttgttatattttatatatttataggatatggtttggtgtggaagaaatgttattttaatgtgtaaaaggttatttagtggtatgatttagagagattagagtatttattttagaattgaaaatgaggtttggagtttgttttgtttttgtttaaggtcgtgttttagattagtgtatatttatatttttttttttttatatgtttgtgagttttgagatgtgcgggggatattggttttttttataggattgttattagggttagtagggtttagtttaggggttttatatttgggagtatggatatattatttatattattatggaagtatgtagtttgaaggatattgtttgttttggattttagttttttgtttttagtatggggatgatatgatttgtttttatagtagggtttttaaggttaaattagattaacggatttgtaattgttttggaaaaatgagattaaaaattatatagtgaatgaggaagaaatgaaaaaatgttataaaagattttatattttttaaaatatttgattttgtggtgtttatattgaatagttttataaatttttaaagaatattattttttaatttaaagatttataaatgtgattttgtacgattttttaatttaataaagaaaatgtaaaagtggtattatttgtttatataaatgttaaaatgtaaatagaagattagtatgtaaaatttaagagaagaaaataattatgtagtagaaggggttagtataggattgcggggaaaaagtttacgttttttgttatagttattaagatagtatggtattggtataaaaataggtatatagataaagggaatagaatagagaatttagggataaatttaaatatttatagttaattgattttcgataaagcgaataaaaatatatggtggggaaagatattttttttaataaatggtgttgggataattggttatttatatgtaggagaatgaaatcgggtttttattttttattttatataaaaattaatttaagatggattaaggatttaaatttgagatttgagattataaaagttttagaagattatattggaaaaatttttttagatattggtttaggtagggattttatggttaagaatttaaaagtaaatttaataaaaataaagataaatagttgagatttaattaaattaaagagtttttgtacggtaaaaggaattattagtagaataaatagataatttatagagtagttataatttatatatttgataaaggattaatatttagaatttataatgaatataggtaaattagtaagaaaaaataaataattttattaaaaagtgggttaaggatatgtatagataatttttaaaagaagatatataaatggttaagaaatataagaaaatgtttaatattattaatgattagggaaatgtaaattaaaattataatgtgatattattttatttttgtaagaatggttatgataaaaaaataaaaaaatagtagatattggtgtggatgtggtgattagggaatttttttattttgttggtgggaatgtaaattagtatagttattgtggaaaatagtgaggagattttttaaagaattaaaagtggaattataatttgatttaataattttattattgggtatttatttagaggaaaataagttattatatgaaaaagatatttgtatatacgtgtttatagtagtataatttataattataaattatggaattaatttaaatgtttattaattaacgagtgggtaaagaaattgtgatatatatatgatggaatattatttagtcgtaaaaaggaatgagttaatggtatttgtagcgatttggatgagattggagattattattttaagtgaattaatttaggaatggaaaattaaatatatatttttattgatatgtgggagttaagttaagaggatgaaaaggtataagaatgatataatggattttggggatttgagaggaaaggtgggagggggtaagggatattgtttaggtgataggtgtattaaaattttataaattattattaaagaatttatttatgtaattaaatattatttgtattattataatttacgggggaaaaaagtaatataattatgaattaattaataaaaaataattttgtttttagtttgtattttattttagagatattttttttgtgtttttatatttggagttaagtttttgatttttgtttttagtatatttttgaggatttttttattacggttattagaaatttttgtagaaggttaaatttagtgggtttttgttagtgtttttgatttgagttattgataatatttgtattataatttatttttttttaatgagttattttgtttttattttttttttatttattgaattttttttattattttttgaaatttttttttaattattatgtttttttattatattttgagatttttgtatttttgatttttggtattttttttggaaaagtttatttaatttgtatttatgtttgatgatttttagttttttggtttaaatttttttattgagattatttattatataaaaatgtttatatattatttttttttagataatttttagatattttaagtgtaatagttttatattgaatttagtttttttttttagttaggttgtttttttttattattttttttaatgaatggaattaagatgtttgtattgggttggggagatgttggttaaaggatatatttattttattttatttaggatatattttaaaagatatattttatttagattggaggaataattttaagagttttattgtataatatggattatagttgttaataatgtattgttgaaaattgttaaaagggtggattttaagtgtttttattataaaaaataagtatgtgaggtgagttataagttttttagtttgatgtagtcggtttatgatgtatatatattttaaaataatatattatatatgataaatataaataatttttgttaattaaaataatttagaaaagtgatatatatttatatatatatatataaaagagatgattgtattggttagtttaggaataagagttatttgggagttttttaagtcggatgttatcgatattatttattaataatttttttaatgttaattaaattaagttttttttttttattattttatttttatgtttatttttttattttttgtttaggtattattagttttgttttttgaattaattttttttatttatgttgtttattgttgtcgtagtgatttttttaaattgtaaatgcgttattatttttttgtttaaaattttttaatgattttttatgatttttaggatagagtagttatttttgagttttgtatgtaatatttgttatgatttagtttttgtttgtttattttttttttttttttgttgttgttttatatttaaagttggttttatttatattgaagtagttgaagttttttagatatgttattgttatattgggtttatatttttgaatttgtttttttttgtgtgagaagtggtttttgttttgttttcggattgtttatattgaagttatttgttttttaggaagttttttttgatgttttgatagtagtattttgtgtttgttttatatttgtatttatttatttgggtttgttgttgttttgttatttgtgtttttttttgtgaattgtaaatattaggaggataagatttatgttttatttttatttgaatatttagtatttaataatgttcgatatatagtaggtttttgatattatttttttattatgatattgtagtatatgttaatatttagtaggatataggatatattttttttgtttttaattttttattgtttatatatatttataattttatttataaggatttataattatttatatgaaatgaatgaaataaatagagaatgttagatattaagagatagtgtggaaagttaggttgggattagggatgtatttattttaggtgtaaaatttaggaggatattaaaagaatttagtaataaaagttaattatattttaatgaaatattttaagaaatttaaattaatggaaaatatataatgaataaaatgttaaaagagaattatttaaagaaaatggagaagtagagaggtagaagaattagtagaatatattggtatataagttaaggaggtaaagatttttaggaaggaggaagtagagtggagttagaagtttaatagaagttattttagaaattttattttggttttgaaatttttttagagagtagttttatataatgtgagtaattattttttttttatttttattattttagaattgagttttttttttggttttagaaatgtggtttttttttttgttaggatatgttggcgatatgatgtatgcggatgtttttaaagttagttggggtttgggggtgaaattaattgattttagggaattttttgaatgttaagttttgtttatttggaggattagagagggtatagagatgattatttagtttttgtttgggatttaaatagggtagagaaataggaggattaggtataaagggagtagggaagatgggtttgggtttatagtattgaatttagggatgatagtaattgtgtgtgtttcgaggtaggtgataaaatatgtgaaaggaagaggatttaggagagatttgaattttagttgttttataagttatattttagtttttttttttaatttatgtgttttttattttaaaggttgatggaattgttgattttttaagttttttttttatttgtatttttttttttttgttgtatattgtttagcgatattatatatttttttagttttttttttttttagttttatttttttttagtttttataattgaattgttttgttgaggagtttttagtagttttttgtgattataagtgtaagttgtatttttttttgagataaagttttttatttatttttttttgagggcgtgtttttttttttgatttttatggatttttttaggtgtattttttgtggatttgtttttgggtttgagttttttttatttttttgatggtgtttggagggtaaggggtatttgtttatttattgagtgttataaattgtttaatttagtatatttattttttatttttttttaagtgtagtgatacggtgagggaggtaatggggtggggtttggaattagatattaggaggaaaggggtggtggttttttttgttttttattttgtgtgtatttttttcgggtattaggaggattttttaaagattttttttttttgattgttttttggattcgttttggtttttaagttttttttttgattttttgtagtgtttaggtgtttaatagttgagtttggagttaggttaatttgttagttttttgtatgaggattagattggacgattttaatttgtttagttcgttttttgaggttttattttagtagttggtaagtaagtttatttgtttttttggtttgtttggtttatatttttgtgagaaagtgttttagaatttgtacgttttaaattgtgaaattttgtttttttttttggttataatatatttacgtattgtttaaagtttagttatttttagtttagagtttgggtttagagtgtatttttttttgtaagttgtgttagtttgtattttgggtaagttatttaaattttttgagttttagtttttatattttaggatggatagtaaatagaattggtataaataagtgagaaagtgatggtatagtgtttgttgtattgtaagtatttgataaatggtagttattgtgattattgtttttatcgttattggttttaatttttattaatagatttttaattttgttgacgtttttgttttagttagttatttgaattttttattttatgattaggtggtattttgtggttatggttatgaagggttagtttgttatttttattgttgattgtaagatgtgagttattcggttttttttttgaagaattagtttagtgttggatatttgtggggtgataattgttggtgtttgtattttagatgaagaaagtttttgaggttattataaaaattagagaaaggagtgatttttggttttttattttgtgtttattttttttttggttttagtatgtaatgtttttattttttaagtttttatttttttttttgtgaattttgatttgtattttttatttttaggattgttgatttttgtagaataattagatgtttatttatgtggtaggattgtttatagttatttattttattttttagtttttatttttttatttatttattttttgaatttatttttttttttatttattttatttatttatttatttattagtttatttacgtatatatttattatttattttcgtaattatttatttatttatgtattataaatttatttatttatttatgtatgaaggtttatatttatttatttgtttattttttttttgtttaatgattttttttttttttatatatatttattcgattatgtttttgtttatttgttttttttaatttatttatttatttatttatttatttatttatttatatattttatttatttatgtatataaggatgtatgtatttgtttagttatttatttatttattattttttttggaatttaattatttttttttttaatatatttatgtatttatttttttatttatttattttatatttaatcgtttatttaattatgtatttaattttatttatttatttatttatttatttgattttatttattttgtatttttcgtttatttatttattaagttttgtatgtataattttttttgtaggagttttattgtatttgttttgtgtttttttttttattttgggttatggtagttatattgttgaaggtttattttttagattttttttttttggttgttttttgtttgtatagttattttttgtttgtttagtttgttttgtggttattttggttatgtttaattttttttggttttggtattatttttgtatttaagtgtttgttattttattttgtgttttttagttgtttttatattttttagtattttttgttagttggattgttttttgtttattttgttatattttttgtttgttttgtagttatggttgttttttttattttgttgttgtattttatattttttgtttttggtattcgtgagtttttgttgttttttttttatgttgttgtttgggtttttggggttgatgtgggatttgggagaattttgaaacggattattgttgttaggatgaaggtggagaggggtattttgaagatttttgttttggggagttggggtggtggtgaatgttttattttttttttatttttattttggttatggtttggatttgggaataggtatttgaatggaggtgtgtaagggagggaattggttggtttggagtgtatatgagggttagaagaagggtaaagtattttgttgggagaggaattgtggggtgtattgtagggggttgttttggggtttggataattgagtttaagaattgtatgttttgtaaaaggtagttatgaggtttgagtttggaatatttttgggaaatgttttttaaatttatttggagtatggatatttaatttgtgtagggtttttatatttttgaatttttttaaattttaaataaaattttgtgtataagggtatatatttttttttttttggagaaagattgaaagatttaaagttttttttttgaaagaggttttttaggatttggagaggttgtgtttgttgaggtgggattgagaattggggtgtagggaattttgagatttttttggtaggtatgagagttttgtgaatagaagtatttagaggaagtttgtggggtttgtgggtagggttggtttggtttttagaggatttaaaatcgaggttggagttgagatgggggtaggtttggtgttttggttgtttatgggttttattggggttatatgtgtgttttttttaggttgtttatgggtttcgggggttgaagggagagaagagagagtttgtagtgttggaatttgtaagttatgttggttatagggttgaggtggtggaaagaggagaagtaagtggggtttagtgtgttggttttgttatttgtgagttttaatttttgattttatagggtatgttcgtggaggggttttttggtttagaaggttttgtggtgagtttagtagtgatttggtggttattgtttttttagagattttttttatgtgtttatttgtgttttttttatatatgtttaggttttttttttagaatttcggagggtttttttaataaaagttttttaaaaaattatttcgaaaaattaatttaatagtttttggggagtaggtggtgtttggttatatggataagttttttagtggtgatttttgaggttttggtgtatttattatttgaggaatgtatattgtatttagtgtgtagttttttattttttatttagtttttatttatatttggaagtttttaaagtttattatataatttttatgtttttgtgtttttatagtttagtttttatttataagtgagaatatataatatttggttttttatttttgagttattttttttaaaataatggtttttaattttttttaggttgttgtaaatgttattttatttttttttatggttgagtagtattttaaggtatatagattatatatatattatatgtgatttatatatagattatatatatatatatgtgatttatatatatatagattatatatatatatattatatatatatatattatattttttttatttatttattaattgatgggtatttggggtggttttatatttttgtaattgtgaattatggtgttgtaaatatgtgtgtgtaagtgttttttttatataatggttttttttttttagtagtgggattgttggattaaatggtagatttatttttagttttttaaggtatcgttgtattgttttttataggttgtattagtttaattttttattagtagtatagaagtgttttttttttattatatttattttaacgtttattttttttttatttttaaattatgattattgttataggagtaagttggtattatatagtggttttgatttgtatttttttgataattagtgatgtagagtatttttttatatgtttgttaattatttgtatatttttttttgagaattgtttgtttttttgtttagtttattttttgatgggagtatttgtttattttttgttgatttgtttgagttttttgtagattttggatattagtttttttttgtatgtatagtttgcgaatatttttttttattttgtgggttgtttattttgatgattatttttttttttttgaagaaattttttagtttaattaggttttatttatttattttgttttttttgtatttgtttttgggtttttggttatgaattttttgtttatgttaatgtttagaagagtttttttaatgttttagaatttttatggttttaggttttagatttaagtttttgatttattttgagttgatttttgtataaggtgagagatgaggatttagtttaatttttttgtatgtggattgttaatttttttagtattatttgttgaatacgttgttttttttttattttatgtttttgtttgattagttggttgtaagtatttggttttatttttgggatttttattttgtttaatttgtttatgtgtttgtttttatattatttttatgttgttttggtgattatagttttgtagtatattttgaagttaggtaatgtgatgttttagatttattcgttttgtttaattttattttggttatgtgggtttttttgtagttttatatgaattttaggattgtttttttttagttttgtaaagaatgatgatggtattttgatggggattgtattgaatttgtagattgtttttggtagtatggttatttttataatgttgattttatttttttatgagtatgggacgtggttttatttgttagtgttatttataatttttttcggtagtgtttttaatttttttcgtataggtgtttaatttttattgcgggaagttagggattttgaatggagggatcggttgaagttatagtggaataatataaattgtgaagattttatggatatttattatttttttaattaatatttttataattttttatgtttgtttttattttaattttttaattttgttatttttgtaagttgaagatgtatgttattttaggattttgtgatgattgcgttaattgtataaattgtttgtaaagtatgtgtgtttgaataatatgaaaattgggtattttgaaaagaataggataatagtaatttttagggaataagggagataattataaggtttgattgtttgtagggttaggtagaatagagttatatttttttttttgtaaaagtaaataggagaaatatcgttgaatttttttgttagtaaggaatagttttgggaaaagaatgtattttcgggggaggtttttaaaatggttattttgggagtgtttgaattatatggttgaagataagggatgaaatatgttttggttttttgtagtgtttttaggtttgttaggattaggaaattttagtttggtaaattttagttatattggttttttgttttcgaattttgttttttgttaagatgtttattaatgataatgtgtgtttagcgggatgtggaattttattagtgattttagttttgttttttgttttgtgattttttattgttttttgaagtatgtgatttttgtgatttattttttatttatagatttttattttttttgaaattcgtaataaaaatttgttggttttgcggtttaggtgggtattatggaatttgttgatatgtgatattattttcggagatttagttgtaaattttttttttttgtattttttttttttattttttagattggtttatatttagggaaaatagaaaagaatatattttgaaatattgggggttggtttttttagtaaatttttttggttaggtatatttttaagtattttatttttttgtagttattataaaaggggttgagtttttgatttaatttttagtttggttattgttagtatatggtagtgttatagatttgtgtatattgattttgtattttgaaattttattgaatttatttattagatttaggagttttttggataagtatttatggttttttaggtatatagttatattattggtgaatagtgatagtttgattttttatttattgatttgtttgattgttttggttaggatttttagtattatgttgaatagaagtggtgagagtgggtatttttattttgttttagtttttagggggtatgttttgaattttttttcgtttagtataaggtcggttgtgggtttgttatagatggtttttattattttaagttatgatttttgtatgttaagtttgttgagggttttaataaaaaagcgatgatggattttgttaaatgttttttttgtatttattgagattatatgatttttgtttttaaatttgtttatgtgatttattatatttattgatttgtgtgtattaaattatttttgtatttttggtatgaaatttaatttattattatgtatgatttttttgatatgttgttggattatgttagtttgtattttgttgaggatttttgtatttatttttattagagatattggtttgtagtttttttttttattatgtttttttttggttttggtattagggcgattttggttttatagaataatttagggaggattttttttttttttgttttggaatagttttagtaggattggtattaatttttttttttgaatgtttgattgaatttagttgtgagtttatgtgaatttgtgattttttatcgttggtagttttttaaaaattattattttaatttttttgttttttattggtttgtttatagtttttatttttttttgatttattttaggagggttgtatatttttaggaatttgttttttttaggttttttagtttgtgtttgtgaatgtgtttatattagttttgaatgatattttatatttttgtaatattagtggtatttttttttattttgtttttaattgaggttatttggattttttttttttttggttaattttattaatggtttattaattttatgtatcgttttaaagaattagttttatgttttatttattttttgtatttttttgttttaattttatttatttttgttttttttgttatttttttttttttgttgggtttgggtttggtttgtttttgtttttttagttttttgaggtgtgattttatattttgtatttgtgtttttttagattttttgatataggtatttaatgttatgaattttttttttaggattgtttttattgtgttcgagtggtttttataagttgtgttattattattatttagtttagagaattttgtattttgattttattgttgatttaaagattatttaggagtaaattatttaatttttatgtatttgtatagttttgaaggttttttttggagttaatttttaattttattttattgtggtttgagaggggatttgatataattttgattattttaaatttgttgaggtttgttttgtggtttattatgtggtttattttggaggatgttttatgtgttgatgagaagaatgtatattttatagttgttgagtagaatgttttgtaaatatttgttaagtttattttttttagtgtaatttaagtttattgttttattgttgattttttgttttgatgattttttagtattgttagtggagtattgaagtttttattattattgtgttgttgtttattttattttttatgtttagtaataattgttttataaatttggaagtttttatgttaggtgtatatatgtttaggattgtgatatttttttgttggagttatttttttattattgtataatgtttttttttgttttttttaattgttgttgttttaaaatttgttttgattgatataagaatagttatttttgtttgtttttgttttttatttgtatggaatatttttttttatttttttattttaagtttttgtgagtttttatatattagatgatttttgaagattgaagatatttggttgttgaatttttattttttttgttattttgtattttttaagtggagagtgttaatattgagatgtgaagtattgttttattttttatgttagttgttgtttgaattttttattttttttttttgtattattgttttataggttttgtgagatttatgttttaaggaggttttattttggtgtattttggagttttgtttgaagatttagaattttttttagtattttgtgtagtgttggattggtagcggtgaagttttttagtatttgtttgtttgaaaaagattttattttttttttatttatgacgtttagttttgttggatataaaatttttgtttggaaattattttgtttgaggaggttaaagataagattttagttttttttggtttataggttgttgttaatttgataggtttttttttataggttatttgatgtttttgttttatagtttttaagatttttttttttgttttgattttagataatttgatgattatgtgtttgggcgataatttttttgtgataaattttttaggtggtttttgagttttttgtatttggttgtgtagatttttagcgaggttagggaagttttttttgattatttttttaaatatgttttttaaatttttagatttttgtttttttttaagaatgttaattatttttaggttatttaatataattttaaattttttggaggttttgtttatttattaaagtttttttttttttgtttttgtttgattgggttaattcgaaaggtttgttgtttgagttatgaagtttttttttttatttgttggattttattgttgaaattttttagtgtattttgtatttttttaagtgtgttttttatttttagaagttggattgttttttttttatgatatttacgtttttggggtatttttaatttatattttgtgtttttaaaaaatttatttaagttgttttttatttttttttggtatttttttgagtagtttaaaattaattttttgaattttttatttagtaatttagagatttttttttagtttggatttattgttggggtttagtgtggaggtggtaggggagtgaagtagattttgtgagaatttttggttgtagatagatttagtgtggtggtttttttaaatgttggttatgttagtagtgtagttgttatgtgaatagatcgaagattattggttagttaagattttttagttagtggaattagttgttttttttttttttagagtagttattttgtcgtgaattgttgtaatgttttgagttggttggtttttagttaggatgtggtgtttttaagagggtattagttataatagtagaaggtggatataagtttgttttaagttggttaagataaatatttagttttttaggtaatgagtggtgttataaagtttttaagagtttacgttttttgtgattggttattaggtgggtagagaaatgtttttaggtgtggatagggttaggtaggtttgagtttagatttttttcgggcggggggtttgcggtagttattgtgagggatggggtggagggtttttttttagttaatggaattatgttttagagggtattatggttgtttttgttattagagaagtaggggaaatttggtagtaataggttttatttagtttttatgtagttggcgaggtaggttttgtttttgttgtgttatattaatagtattgaatttatttttttgtagtttttaggatggatttagattttattttaggttataagttttttgttgagaaagtaagtatagtttttaggttatgtgtttttttgtttgtttataatgttggtagtaatttttgttttttttttagtagtttcgttcgtttttagattttgttttagaggatttgtgtttagttagaattataataaattttagttggacgttttttttatattgtgattttttttaaattttgtcgtttgtttttttttagggtttttgtgagatatagttaggggtggtttttttgggtttgagttaaagattgggcgtgtttataaggttttttttattgttgtatttattatatatatatatattttttttttttttgttgcgacggagttttattttgttatttaggttggagtgtagtggcgcgatttcggtttattgtaggtttcgtttttcgggtttatgttatttttttgttttagtttttttagtagttggtattataggcgttcgttattacgtttggttaattgttttgtatttttagtagagacggggttttatcgtgttagttaggatggttttaattttttgattttgtaattcgttcgtttcggttttttaaagtgtcgggattataggtgtgagcggtagcgttcggcgtatttttgtattttatgttaaatttgttttaggtttaggtaaagttaaattttttttttgtaatttggattttcgagttttttagtggggatatgggttcggaggtaggtttttttttttttacgttttgggaacgtatagttttttatttgtttggtggagtttgtagtggttttttttttttttaaaaggatttgtgaattttttcgattttttgggtatttttttgtagtggttttttttttgagggatttgtgaagtgagttttttaagatattttttgttaggtgaatagtttgtggtttttgtagggtttgtattatttttgggtattgtatgttttatagagtgggttttttttgtgtagggtttgggaagaggttgattataatttggtgtttgaggtttggtagtattatattttttttagtgagttaggtttaagtttgagtatatttgtagagtttatgtttgttgtgttgtttatggaaggtagggaatttaaaattgtttttttagagatggatttttattatgttttttaggttgtttttaaatttttggttttaagtgatttttttgtttcggttttttaaattattgagattataggtatgggttattgtgtttagtttattatcgatttttttttattttatttagtttttaatttaatgtatttttttttttttttttttttatttttgatgttttttttagggtggtaattaatgatttttatataatttaagttagtggttattgttttgtttttgttttatgtgtgttattagtgtgtttgagatgttttttttttttttttttggaagtttttttttgttttttgttttttatgaatttattttttttttgtttttttattaatttttagttttttgttttttagtttttttttttatgtttgtgtttgtttggatgtaggagtatatatttagatttttgttattttgattttgtgtattttttttgagtgatttgatttaaaattagaattttatttattatgagtttttttttagtttatgttattaatttaatgtagtatgatatttatttatttattttattgtttttaaattaattgtatgtttttttttagaagtttaaatttagtatgttttaaatagaaaattttatttttttttaattatttaattattatttttgtaggtacggatgttataattttttacgttgcgtggttattttcgatttttttatatttttatttttggtatgtgatttagtgatttttgtggttttttatgttattattgttattaaatttatttgttgttttttttattttatgtttttgttttggtttacgtttttattattttttattagaggtttaaaagtgttattggttttgttttgagtttcgttttttttagtttattttttttataggtgttttatttaaatataaatttgatcgtgttatttttttgtttaagatattttataattttttatgttttgtgggataaaatgtaaatatttgttattagtatataaggtaggttatagtgttgtttggtttatattttttttggttttagttatattgaagaattgtagttttttttgtaattttatgtttttttgtttttgagtttgttttttttgttggaaatgttattttttttttttttgttttgttatttgtaggtgaatattgtttttaggaattttttttaaatcgtattttaattttgtttttgagtagtttttgtgtatattttgtgatatttagtggtgattaaattatatatgtagtaattattttttttttgtttgttttatttttgaattttaagtagattaaggataaagtttttatttttagagttttatttttattatttagagagtgaaagtttataaaaagtatttattaattgaatgaaaattaatatttgaagtgtggaatttgttttaaaatgtgttaatttttagtttttagattttgtaaatataataaatataaagtaatttaagttgaattaattatatttgtgtagtttagtttatatatcgtgtattttttttttttttttgggatttatttttgtaggtgagtaattttttagattttaaatttagtgggggatttttattatttatgtgcggtattgaatttgttgttatattatgtatttaagtagaggattggttttttttatgttgggttgggaggggaaatttttatttagggattattaattatgtagtgttatttggttttatttttttttttaggtcgaattttaaattttttgtaatttattgtaataataatttattttttgttattaattagttgttgttttttatgtattaggtaaagttaagatattattttataggttttttaaatgttaataatttgtatttttaggtgaaattatatttgaaaattatattttataagataattttgtgaatgttatgtgaatgataatatttttaaatttattttgtttaaaatgtaagtgttgtggataaaattatagaaggtattattttttttttaaaagtaagaatgtaatttgaagtttataaatgttattaagattttggaggtatttttatgttttttacgattttgttttattttgaaatatttattttatttttttatttttttgttttgttttatggttatattagtaatttttaatgtattgttttgtagggtttttgagattttataggaatgaggtaggaggattatttaatattgtttttattaggagttgtgtgatttggataagttattttatttttggggttagttttttattatggaaaataagtttttttatatgggggtgtgaagatttaatgagtaagtttagtatatagtaagtgtttaataaatattattttattgtatttagtattattattattatagacggatgttaagtttttagggataagggaaataatttgtatcgtttatgggttatttttgtttttgtttttttttattttttttttttttttttatttgtattttttattttttgtgttatttttttatgtttttaataatttttttgttatttgtttgttttttgtattttgtgtagtattttacgtatttatttattttttatttttttttttatgtagtagattatgtgttaatatatgcggagtttgtgtagacgtatagattttttggggagtatatgtttgaatttgatgaggaggagtagttttacgtgaatttggatgagaaggagatggtttggtttttattagagtttatttatatttttgattttggtgtttagaggggtattgttggtatcgttatggtaaggaagtatttgaatattcggattaatggtttaaatagatttgggttataaatggtattgtttatagttgtttgttttttttagaggggtattgttggtatcgttatggtaaggaagtatttgaatattcggattaatggtttaaatagatttgggttataaatggtattgtttatagttgtttgtttttttagagtttagttggagggatgggagggtttttttgttatatatagaattagaggttatgatgtttatttatgaatgagttttttttttgagagcgagaaattttgggtttatatagttgggtttttaggatagtagaggaggaggtattttttttttatttaagagaaaggttgggttgagggggttaggttaggagtacgagaagttgtgattttgtttaggagttttaggggagtaggaggatgggtttgggagaggtggtttttaatttggtgaatataggatttggggtggtggaatttttaagaattagttaatggtagtaggttttttgggttttatttttttttggagtttttatcgaggtaagcgttttttttaaggagtttgtggatttgggttagtttaatattttcgtttgttatgttgataagttttttttattagtgttgaatattacgtggttgcgtaatggggagttagttattgagggtattgtagagattatttttttgtttagtaagaaatttagattatataggttttattatttgattttcgtttttatggtcgaggatatttgtgatttttagggggagtattggggtttgtattagtttttttttaggtattggggtatggagcgttttttttttgtttttacggttttggtattatttttattttttgggtttatcgttttttagtatttgttttttttaattttatgttttatggttattttatttaaattttattattttatggtttcgaatatttaatattttttatatttaaggttagtttttgttttttgtattttataattttgtttttttttggtgttttagaggtttatgaaataatttaggtgtttgagattatggagatgttggtttgtgttttcggtttgttggtgggtttggcgggggtttttaatggtattattgttttaaagattaagcgatttgatagtattttcgggtttaggggtttttatgagttattttataggtgtattagggatagagtggaaaagacgaggtaataagttaggggtgaagagtgggaaagagaaatattttattaggggttttttgagtattgatgttttattgttattgggttggataaaaatattaataaatgtaatgagaaatgatatttattgagttgtttattatgttttaggtattattttaagtgttttttatgtgtttatttatttatatttggaggttggtttttatttattttatgttatagagtaggaattagatatcgggagaggtgaagattatatagttttaaagtgtaaagtttggatttaaatttaggttttgggtttgtagtggttgtagttttgtttagtatttagattattttatttgtagttattatttgtttttttatattttatatagttttaatttttttttgttcgtagagtgatgtttagaatttttaatgttatgttaaatatttttagtaacgaaggatattttattttttgtataattttaaaggtaatttattttatttttttgaaatatatatgttatagatttttggtttattatttttaatatgttatgaaattgattaaattttgtttatgttttgagttgaatttagtttaaattaatatgaattttgcggagtttattaatgtgttaattatattatatattttttgatattgaagaattattgtatttttagaataaatttaaaattggttaaaacgtattgtttttataatgtattgttggatttagtgatatggttaaaattagtttataattttgtttttttgtattatttttagttggttttggaaatataaatgaattaattttataaaatgattttaaaaattttgttttattttatgttttagaattatacgtgtaagaggtatgatttgtttttggaaatgtgggaggacgtttttatttgtaataagattaggatagggttttttggaaggcgattttttgttttttatgataatttttttgatattttttattttattttagttttttatttttttttgtagttttgatttttatatttttttagaaacgtattcgttttatttaaatttttaaatttatatgtatagagttggtcgtaagattttgtattttaaaatgtgtataaatgttatttatttttttcgttttgaattttttgtattttttttaggagttttgttagaggttttattaaagtttttattgttttaaaatttgattttattttttttatttttatattttattgaatttagtttttgtttttattatttatatgtattttttttttgttgtttttttgtttttttatttttttaatttatataattagtttatttgtttatagttattttattttaataaaattgtttaatagtttgatattttatgtagtattttgaatgaatttattttatttttttataaagattaaatatttattatgtttttagttattttttttttttttattatttttttgattttttagacgtttaattattaagatgttagatgtttgtttttattttttatttttttttatttgttttttatattttttattgtttattcgattatattgtttttgggatagttttttagtttggttttttgtttattaattatattttagttgtaaaagttttattttttgttttatttattatgttttttattttaatttttattaaagtttaatatttgtgtttgatttagtggttttttgtttttgttttaaatttttaaatttttttttatttttttatttaagttttttttattgtgaattaggggatatttggaagaaatatataaattaatagaatgtacgttgaatggttattatcgtaagtatttatgtaattagtattcgggtgaagaaatagattgttgttagtatttttgtgtttttttttaggttaggaggtagtgtgtaagttttttaggagttaaaggttgttgatatttataatgtttagtattgtttttggtatatagtaggttttttataaatattttttgtagaagtattttattatttatttagtgtgtattttttaaatgttttttatttttaagtatttttatttatttgaagttagttgtagttatatgatttatattggaaaatgaaatgcgagaagtgtgttttttttaggagggattattaaaagttagtgaataaatttttaggttttttttattttgttggggaggttttgggagtagatgtgtaggagaaagattgttagtttggttttttgagtacgatgatgagtagagttttttgtatgatttattttggacgtgtaatatgagttaaatttggatatttgggtatttgttagtttagtatagttgattttatttttattgtgtaaaagaaattgaagagaaggtgtttaatgagattttagagaagttgagagataaaagaattaggaggatgttttattttataagttaagtgtatagtaattttagggatagtttataatgtaatatgtttaaaaggtattaattatggtaagtgtttattggtttggtagtaagtggttattaaaattttttttaagagtatttttatattcgatgtttaatttttatttttttttatttttattattttttggttcggttttattgttatttgataaatggggataaagagagggtgagatgatttttttttagggtattttttgataattatttgaggtagcgttgtttgttgggtggattattttttcgttagggaattgtgaggggtagaaaatgaagggattaggtggaaagggatggaggatataatatttagttgggagttttaagttcgtcgggtttttttttttgtaggtattaatttttttgagttagaggttgagttatttattttatattttttttaaagttttagttttaatttttttttgaatttttgttttttaattttaatgattgatgtattttaagatttttttattttttggttgtttttgattttgttgtatatagtatttagtaaagggtttgatttttagaaaatattttattaatattgaaaatttgaagtttagtgataaggtggttttagtttggatggttttttagtttttgttttttttgggatttgtttttgtattgtatttttttttagaaattttagagttttataaatatttgtatatgttagagtgagatatatttgatattttttttttgtgattttagggatattttttattttttgatatttttagttttttaggagtatatattttgtttttgtaatgtgggtgtagatattttagtttttgattttgataagtgttagtttagagattgtttattttattcggggtattgttttaatttgtaatatgagtataggagataagtaggaaagagaatgattttgattggatatggtttgtaatttgtaatgttaattgtttagtgattttgagggtaggatttatgtgttttgggtttgaggattttataatgatttcgatttgaagattttttgttatttttatgatttttttttatcgttgaatttttggattgaaattatattaattttatgttgtataggttttttataagttttttgtgaagttaaaagggaaaataagatagataaagggtttttatttattatatattgttttttttagtttattatgtgatagttgaaattattacgtaaaaataagttagtagtatttttttttatagtttttgaggaaatgaggttgattagggataaagatgttttaaaaagaaaaaatgattgtgttttattttttaggttaagaagattatgagaaatatgattggttgtttttgtgtgtggttttttttttttgattttttgatttagtttagtttttttgtagattttagttgtatttatttatatttgtgttagtgacgtttaagtttgtgtttttagttttattttttttgaaattggaggaagtcggtttttcgatggaagatattatttgtaaggggagatgggtaagaggagtatagtagttttcgggaattgattagggataggtgtttagggatatataaggtttagaagatgtttgtaagaagttagggagattgaaggtattaattggatgtataagagagttgttgtgtattgattgtgtgtattaggagtgaagaatttattttttatacgaaaaagaaagtttataataaatatgttttttattttgattaaaaggtgttaatatgagacgtaaaatatataataatgttggattgttaagaaaaaaaaaaagattagtgtttgaaaaagagtgttatatgtattgttttgttttttttttagtgggagttatttttgtttgtatgaaattaagataggaggtttaggttggtggatgaatgtagatttagacgataaatgacgtttattggatgtatttaaaagtttaagtcgtatttggttaaggagtatttgtgatggtatataaagaaaatggttaaagtgtattagattatatttatgattttaaattttgatgtttatttaattttttaatggtaatgataaaatatgtttttagtaaggtatatgttgaattagtgttgtgggaatatgggttttattaggtagatttgtagtttgtttattattgaatagttaagaatagtggtttgagatataaatggatgagggtattaaatttgatttgggggtagtttattgaaatatagttaatttagaagagtgttatgtgtaataggttttattatataatagttaatatatttttatttttatggttttttttttttttatgtttaaattaaaatgaatttttttattaatttttattgtttattaaaatttttagagaaaagtgatgagagatgatttggtgtatatttttaaaggaaaataaatagttatgttgggttttgattatttgtggtgttaagaagaagggaatatggttggaggtttagtgagagaaatagtgttttgaattaaagagtagaatgatagaaattgattttagagtaattttttggtagtagtatttaatttggaagttgaaggtttgttttggagttagatgttaacgaaatatagtaaatgttttttttaaggtataatagtttttttagtgagtttaggaattttgtgggggtaaaagataagttattttaggttgttagttttttttttgtaagtttaggagagaaaaattatggtgagaggatgcgttttaggttgataaataatagagttgatttttgttttttttagtaatggagttaagtaatgttttttttttatttgtttgaaggttgatattgaaagaggggtttatgtttgagattttttttttggaggagttttagtgttataatgtatagaaaggatttatatttttttgtaatttattttataaggaaattaaagtaggaatattatttgtttatgtagattttcgttgaattgaaatgaaagacgaaaggttatataattagttattgaaattattttagataattagagaaatatttttattttattaaattttattgtttattatttaatggacgtttcgtaggagtttgagtatttgggattttatgtatttggttgtattaagattttagtttgggatttttttttcgttataggttatgtttgtttttcgattatttgatattagtggtttttagagttttttgatattttttttttgttaaattttttatcgtggaataagtgtgaatatgttaggggaaggtaagtttcgtttattttgtaggtttttttattttttttgttttttttgtgtatgaagatgtttattttatagatgatgagttttagtacgaagtttttagttttcgttaatgttttatttcgggtagaattagattgtgtttttgggaaggatagatttaggtttagtgttatttttattagttgtatttttatttatgttttgtttgagattttggagtttgatgtagtatatcgggatgaggatagtgtagcggaaaaagtttgttaagaggaaatttagaaagagttatttttatatttggaataggggtgtgattttaataaggtggtaaatgttgattttggaagttgttttttaaaatgtttgagaagaggttaaaatgttgaaggaagagaattgtttttatgtgtgaggttagtttttaagtgtgagggtttcgagattagttagtgtttttagattttttgataagggggagaattatgaatttttaggaatttttaagttaaggttaggaagtttttatttttttggttttaaattatgtttaggagttggtatagaagaaagatggggtttggatatggttttagggtatagatgtagaagataagatgagtggattttagagttagagagttttttgttttttagaggtggggtttagagggttattagagatttattttattttacggtgataggattatttaggttggtgtgttttatttggtaggtgtagatatttttttgttggggggttatttttagtattattaggatttggaaggtttagtttttattacggattaggttggtggatacgattttagttgtttttttttgtttatttaggaattatcggatttgaatgttgtttgggtagaaattcgttacgtggtagataagtaggttgtggtgttgtaagggtttttttttggagggggaaatatttattttaggttggattaggagcgtggaagaaaaataatgaaatagaatttgagattgtttttttttttttttttttttttttttttttttttttttttttttttttttttttttttgagatataatttcgtttttttttttttttattttttttttttgttgagatggagtgttattttgttgttaagtttggaatgtagtggcgtaatattggtttattgtaatttttatttttgggttttaattaattttttttttttagtttttcgaatagttgggattataggtgtttgttattttatttggttaatttttgtattattagtagagataaggtttttttatgttggttagtttggttttttaggagtatttgattaacgtttgattttaagtgatttattcgttcggttttttaaagggttgggattacgggtttgagttattgtatttgtttagattattattttttaggtatgtttattatgtaattgatttttagatgttgaaaataggaataatgtgattaggttagtgggtaagggtagtattgaaaagatagaaatagatttttaagtagagtatgtatgattttgaataaaataatagttagtaagtatatagcggaatggtagggagatagagtttgtattttgtagtatatttaggagaaattttaattaaaagtaatttgggtaaagaatatttgattaattgtgaaattatttatttttttaaagttttattttgatataaaggaagtaaaatttatttaaataatattttgaaattaagatatatagataatggtattatggtggtttgtgaatttaataattttatgaaaatataaagaaaatgaagagagttttatatgttttattttgtaaaaaatttatgtatttttttattttatttataaaaatttaaaatttttatatttatagaatattttgagtttttatatgtttgagtagtagaaatttcgtttttttttaagttttttttttgtgttgcgtttttaggttttatgaaggttttatagatgattaggtgttgtttttttttgtatttttgtatttgtgttttagtttgttttgttgtttttaggtgaatttttatattgttattggtaattttttttttggatttttgttattagtattttttttttttttagaaagtagaaaaggttaggtatggtggttatgtttataattttagtattttgggaggttgaggtatgaggattatttgagtttagggttttgagatcggtttgggtaatatagtgagaatttatttttaaaaagaaaaataaattagttagatatggtggtacgtgtatttgtagttttagttatatgggaggttgaggtaggaggattatttgagtttaggaggttgaggttgtagtgagttatgatggtgttatagtattttagtttgggagataaagtgagaatttgttttaaaaataaatataaatataaaataaaaaataaatatagaaaagggttaagtgtttttagagaatagtttatttagggagatttattagagaatagtttttttagaggattattttagagaatagtttattaagaggaatgttttaaattagttttttaggtttttaattatttagtttttttttttttattttttggagaatataaatattttaatatggcgttgggttaggtaaaagtatagttttgaattgatatataatttttattttttattgtatttttgttttgtttttagattgatttatattgttagtttttttttttaatgtgagtttattttaggggtatttgtgttttattattttattatttcggttaatttaatgtttattatattatttaatttatgtttaaattttagttgtgaattatttataattttttttttatagagtttttgggaattatgaaattagggggaatatttgggtatttgttttaaggttttagaatattttacgagaggtattttgtttaatattttttgataggagtaggttagtttggagttatattagtgatttttagggtgcgttggagttaaggtttgatatttaatggttttatttttgatttagtttaaatatattttattaaggtaaggatttttgtttgttttagttgttttttttaatgtttagaaaatatttgtttaattatttttagatttgggtggatatttattttggaattgttattatttttttttttttttttttattttttttttgtttttgtgttttttttgttttaatttatgttttgattgtaatttttttgataaataatagtagttttttattttatttttttgtttttggttttttttttagttagtatttttagtagttttttgaagatatatttttaatttttttttttttattttttaaaaatttttagtgttttgataatatttatttggttatatgggaatttttagggagttgattataagtagagatttttagatttttttatttagggaatttgagtttgggggtattgagtttggagatttgtgtattatagaggatttttagaagagtttttagaggagtgaggttggggatttgcgggtttggaggagaaatttatattttttaggttggtattagggttgtttgtaatttggtagttgattattgtgaaagaaaatgttgttatgttattgattggtgtttttataaagttttagtaatagtttttgttaattgcgttatttttatttgaatattttttttaattaattattttagtaatttttttaagtttatgttatttattttatttttatttagtgtgtttatttttttatttatagtaggtgaatttttttttattttttaggaataagaaaattaaaggtgtgatttttttagtttttttttttttttttttttattttttttttttttttagaaaaaaggtttagggtttaattttatattttgatattatttttttaagttttttaggttggtgtattaggttttttattttataagtttataggaggaagttaaagttttaaggtttttttgttttatttttgagaaatttttttattgtatatattttatttttttttatttttttatatttagattttttgaaggaaaaagacgaatgaattgagatattgttttgtgatagtcgtggggaatttaagataagtaaaatttattttagtttcgaggaggatgcgttatatttagttttatgtatttttttttattttagtttttgtcgttgcggttaatttgttttttttaggtttttttggtttttaaatttattttttattttttgttttttgatttttttaagttattggtatcgttgtttattgtgttgttgaggttatttttttttagtttttaagatttttttttgcgggtttttttttatattgtatttgggtttttttggttttttttataggtttttttgttttggttaaattataattgtttagtttttaggattcggttttttgtttttttttttgggttttttttttttggatggttttatgtattttagtttttttttcggttgtagatttttttgtttatttgtttattagattatttatttgttttttaagtattttaaatttagttatttttttgtaggttttttttttgtgtggtttgttgtgttatttttatttttatttttatattatatttttgtgcgttgttttgtggttttttttttttattttatatgtagttagttgttaggtttgatgaagttttcgggggtttttttgttttcgttttttttattttatgtttagtttagtttaggttttcgcgttcgtttttttgataagttttagatgggttttttttatgaatttttaatttaaagtttttttttcgttcggtattaaggttttttaggttaattcggttgtttttgcgttttgggtacgggttcgcggggttgttttgggatcgtcggtttaaagtttttatttatttcggcgttgtagggttatgggttcgtttagttcgtagttgtgtttgtatattttgttcggtattgttcgttttttttttaggatgtttttttggttgttttagtatttcgtagtaggtcgttttagtttcgttatcgttcggaatttttttacgtcgttgtcgaagcgcgcgaatttttttcggttgtagatgtatttttttaggaagcgttgtgttttattaaacgcgtagtatttttgtcgtttttggaaaaggtaattttttgcggggagggggcggatatgagcggaggcgttatttttatttaatttttttttttttttttttttttaatattaacgattttttttaaatttttttatttagggttggattttaaaataggagtttttttagtatcgagttttgtggttttaagcgggtcgtagagtttttttaggtttgtttttttattacgtagagagagaatttattgaaaagaatgagtttaggggtattgagtgattattagggaggggcgagtattgaggggaaggtagttttttttgttggtggttggaggaggcggagacgttttacgtggggttattgggagaaaaaataggggcgggaggagttggggacgtggagggcggagttgttttttttatttaattttttgattgatatttttattttgatgttagttttggtttaaatgttattttttttaggaagttttttttttttttttttttttttttatagttaagcgtttttttttttcgattagttttttgagaattttttaatttgtttttgttgttttgtatgtaggagatgtagaaatatattttttaaaattttttttaattttggtataagaaagattttgtagtttgaaagttaatttttaaatatggttgtagaaagatttggtgttaaaagatgtggaaagtattttatataatgaaaattattataataattagggatttgtgggggtagagttttttgggtttagaggtattgatgtaattttttttggtagtttttatggttttatttatatataaaacgtggatatgaattttttatttatttttttagttgtgtattttggtattggggttggtgattttgatggtcggttgggtgattttttttatgatgattttgtagttttggaggaaattttgtgagcgattttagtatagtaagatttgttgtatattagtagtatttttagttttttgaggttgtggattagaaatttttggaagttattgggtagtatgttttttttgttgttgttgttgtttttataagtaatgttgggtattaagatttggtttttggattttttacgaattttattgttaagatttttgggttttcgttagttatgtttaattttgatattttagtttgattggtgttttatgaatttgttggttttttttttgaggattttattttttatgaggagtttgagggaggttatgatgtggaggaagagatggttgttagttgtataggtagtatcgaggaagatagtattgatgtaatttttatatgaataattttggtagttttttttatatgttgttttttttagggagtgttatgagtagtgtttggtaggtgtgtgtttatatagaattattagtgatacggtatatgtttgtttttgtttgagtatttttaggtttgttttgtttttgggtatattggggaaattaaggtgttgtgattgttttgtttatttgttttatgttttataaattaatttttttagtttattaattttatttttagtagaagttgtatagttggtggtagaggatagtggagatggggtagggttgggtttaagggtattatggagtttatttttagtttttagtgttattgttaaggtaagattttaggttttgatttagatattttgatttgttttttttttggtgttgggttttagattttaaaattttaggtttagagttttttagttttttggtttagatttttttttttttgttatttattcgtttttgtttgtttagttgttttattttgagtgtggatttttttatttttatttgttagtttttgttttttttttttaattattagtaagagaacgttttttatttaagaataagaattttgaattttttttttgtaatatttaatttttttaatttatttagttttaggtaattttttaagtatatttaatttttgaaatggaattttatttgttaagtagatataagtaatgaggggttttatggtgtaatttgaaatttttatttttttttgtatataagaaattttattttgtttgtggaatttttagtaattgagttgtttagagtacggtttgaaattattgatttgaatgaattcgttttttatttagaataggatatattaaaaatttttagttttttatgggttgttttagttaagttttttttttttagtttttttaagttatagtttggttttttagttttttggttttgtgttttgtttgaggttggggatgtgtgtggagttgggggagtatgtagggaattgtggaattagttttgtttattttatttatttttttatggttttagttttttttttagtaaattttgattgaatatttattttacgtagggagttttagtaatttatttttagtttttgttatatggttttattgttttattttattttttttataaattttaatttagtttttgtttgtttttttttttattgtttagtattatatgtttttttttgttttttgtttttttatttttgggtttttttggtggtttttaatattgttttttattttatatgatagttttgtttatgggatgggggcgttgtattcgttatttttttttgatattgtttagtgttattagtgttgttttagttttttttttttttagttttatttttttgtagtttttagggttgagtcgttttgttggttagtttttagtatttttttgtgattataagtttaagttttttttttttttttggataatgaatttaaggtaatagataagaggttttagggtttgaggggttgtatttaggagattttaattttgttattttgaaagatgaggaggtgatatgatgttagtattttttaggtgtgttttaggaggggtgtggagaggtttaggaggaagggtgtaagtaggaaaagtggaagttagtggaaaattaaggtatttattttgtagtttttttttttagagtgttggtgtaaatttggattagaaatgttttgagagtataatggttgaattagtttatagttttattaatagagtaaaagtgtttttatttttttatattttttttagtatttgttgttttttgattttttaatgatcgttattttaattggtgtgagatggtattttaagatagtgtggtaattttttaaggatttagaattagaaatattatttgatttagttattttattattgggtatatatttaaaggattataaattatgttgttataaagatatatgtatatatatgtttatagcggtattatttataatagtaaagatttggaattaatttaattgtttattagtgatagattggattaagaaaatgtatatatatatattatggaatattgtgtagttataaaaaaggatgagtttatgttttttgtagggatatggaggaagttggaaattattatttatagtaaattattgtaaggataaaaaattaaagattatatgtttttatttataggtgggaattgaataatgagaatatatggatataggaaggggaatattatatatcggggtttgttgtggggtggggggaggggggagggatagtattaggaaatatatttaatgtaaatgacgagttaatgggtgtagtatattaatatggtatatgtatatatatgtaataaatttgtacgttgtgtatatgtattttagaatttaaagtatatatatatataaaaagaaatattttgagagtattttgagagaaaaataatggattatagatgttataatattatattagttatagggaggtagtaggaagaagagattttttatttggttattgtttttttggttgtttgataatttatatttaatttttgttatgtatttatataattttattttattttttttataagtcgtaatttattttagtattttaattaagttttggggaggttgggagaagtatttttaatgagaatgtttttaggggttaaaatttattttttttttttttttttttttttaattgtttaagggatgtgggtttttgttttattttggggaataagaggtatttttcgtgagtattgaatttttagtgatttttagagtttggatattttagtttagggttttttgtttgagttttttttaggttggatgtagatatgaatacgtttaggagtttgtatttgttaatttttttttttgtaaattttgtttgtttaaggttatttaggattttttggttttattttttttaaagataagtatattgattattgggtatttttttttgtttattgtatttatgtttttggagagagaataggttagtagggtagtaagttattttataggggatgaatttttttttttagttgggaagagaggatattgttttagggtaggagttttcgtagtttgttttagaatttgattttttaaagataacgttttttaggaattgttttttgagttagattttttaagaatggtagttcggtttttatttggagtggttttgttttggattatagatgtgagtagtattattagtaacgtcgttagagttattgttcggggggtcgtagaaatttgtagaattattatggagttggaaaaggatggtaaaatgaaaagagttgtagttaggaaaagaaggattcgttaaagggagtttttgtttgaaatattagagattatgaatttaagtagttttttgtgattttgggattggatagagtttgagaaaagaattaatggatattgagttttgtatgagttattgtttattaggtagaaagttagtatgaaaggtttgaaaatataaagtttgtgatgtatttaagatgacggaggaaagatagtgatatttattttaattagttagataagttatgatgtttggggagattatgcgttttttttgttttgaaggtgattttaaatattttgttggtttatttatagggattattatttttttaattttgttatattttatatatttataggatatggtttgttgtggaaaaagtgttattttagtgtgtaaaaggttatttagtggtatgatttagagggattagagtatttattttagaatttaaatgaggtttgagtttgtttgttttgtttttgtttaagggtgtgtttaagattagtatttatttatatttatttttttttagaggtttgtgagttttgcgatgtgtaggagttattaggtttttttataggattgttattagggttaggagggtttagtttagggattttatattgggagcgtggatatattatttattttattatgtaaatatgtagttttaacgatattgttttttttggatttcgattttttgtttttaatatggggatgatataatttgttttatagtaaagtttttaagattaaatgagattaataggtttgaaattgttttggaaaaataaagtttatagagaatataaattgattggtaaataaggaagaaagtgaaaaaaaattattaaagattttattttttttaaagtatttgattttattttgtttagagtgaatatttttataaatttttaaagaatattattttttattttagatatttataaatgtgattttgttggattattaattttaattttaaaaaaaattaaattggtattatttttttaaattaatattaaaatgtaaatagaaggttagtatgtaaaatgtaagagaagaaaataattatgtagtagaaggtgtttagtaggattaaggggttaggagaggattgtggagaaaaatttagtttttttagtaattgtttgggtgggatttttttttttgttatttatttgttatagataattagataaatattttttcgatgttttaggtaatttatttttatagtagatattaataatattttttttaggtttaatatgaggtttaaatgaggtaatgtatgtaaagtattaataatagaattttttatgttttaatttgttagtaattattatttatgtaaggtaaggttattataaataagataaaatattaacgtaatatatgtattttattattatattaaatagtaaatgttttgtgattttttttatgagtattaaataaatagtttaaaattgaaatatttaaaatgagattagaaaagtattttttaaatatggtaaagagaatataaaataaaaaattaatattatttgtaatagaaaaatattagagaaattttttttaaaaataagattaaaatatgggcgtatattgttattataggtaatgttgttttgggtatttttatatgaaaatgaaataataagattagtaatttaaagataaaaatgttattatattgtttaaatattaggaaaaattaaatattaagaaatttgaaaaataaaaattatttagaaattttattaataaaggtaattaggaatagataaataattaaagattaattttatttaagttaattaaaatttttaaatagaaattataatatttttgtagaaatgattaaataaaaaggaggtattttagggaggtggatttgaaagaaagattaattatatattttattagatagtatatttatttttaattattagtagaatatttttgtaaaatattgataatataatataaaatatgatttaaaatatagtgattaaaaaatattaaagattatttgattgtttgggatgggggtggggttcgggagaaggaatataatggaaaatatttgtcgttagaagaaggtgtaatttatttttttatatttttttttttaattttgaaaatgaattgtgaattggagtttttttgattacgttggtatttaaaatttttttattttttttttagtattttttagcgttttttttatttagtaatagagaatgttagttttatgatttttttgataggtgaattttagttatgttgatttttttttatttatttttagtgttagaggtttatagttttagttttatttgtttttattcggttttagttttttattattgtttttgtgtttatagttattaattatagattttataatatgcgttttgaagatagaatgttttatattagagttgtgattttgagagttttttttttggtttttttgttgagttttcgaggagttggggttattaagggtgagtgtttaggaggacgtaggagcgtcggggtgagtgatggggtggtttatattaattgttgttttagggattatagattttaggggtttattgatttatttggtttttatagtttatgttttttttggtttttataataataatagtaataatagttagaatttatgagatttttgtatagtttttttttttatttatattttataggaatttttaatgaagataatattttatttatttagaaattattttttttatttagaaattattttgaaaaaattgaagtttaaaaagatgaataagttttttaaggttatatagtagattaacgagttaagtttgaagtttagatttagttttgagggttatatattgttttttttagatttttgtatatagtgatttattattagggtttttttatttttttgggatttttagtttttattttttgtggttgttttataggaatttcgagttatggattttgtattaggagacgaagtgtaaagagtgtttttgtatttttttttttttttaggattttagggttttttttgggtttttgtgggtggttataagttttttttttttaagatagtagggttgtatggttttgatagttttgtgattcgggttttgagagatttaggattgtaagggaggtttagatttttgatagttgtaaggatttagttagagatggatcgtagtgaatgttttttttttttgtagttgaaattagggagaatgatattaagtttgtgtatgatgttgttattttaaaatttagtgatggggaaggttagaatttataacgtataagatgtatattggttttagatagttttatttaagatgtgtagaataaagaggaggttaggttgggtagaattagaagtatttattgttttgttcgcggttatttgagttatttttaatgttatgttataataaatattataataggtttttttttatagatgtaaatattttttagtatttttggtagaaatttttaatgagtttagttgtttttttagggtttttttgtttagttttttaatatttaaatatgttatttattttaaaaatataagtgtaaattaattgataaaaaataattttgtttttagtttgtattttgttttagagatattttttttgtgtttttatacgtggagttaagtttttgatttgtttttggtatatttttgaggatttttttattttggttattaggaatttttatagaaggttaaatttagtgggttttttttagtgtttttgatttgagttattaataatatttgtattataatttatttttttttgatgaattattttgtttttattttttttttgtttatttggattttttttattattttttaaattattttttaattattatgtttttttattatattttgagatttcggtaattttgatttttggtattttttttggaaaattttatttaatttgtatttgttattaatgatttttagttttatggtttaaattttttttttgagattatttataatttataaatatttatgtattatttttttttagatgatttttaggttttttaagtgtaatagttttatagtaaatttagtattttttttcggttaggttgttttttttgagagaagtggtttttgttttgttttttgaatgtttatattgaagttatttgttttttaggaagttttttttgatgtgttgtttggtcgtattttgtgtatatttacgtatttgtatttatttttttgaatttgttgttgttttgttatttgtgtttttttttgtgatttatacgcgtttgtagaataggacgtatgtattatttttatttgggtatttagtatttaatagtgtttgatatatagtagttttttaatatatatttttgtttgaatggaaatgatattttgaagaaaaataatttgttttatagttggttgatttttggattgtagaatttgtgaaagtgttttttaaaaagtattttaaaaagtataagggatatttatgtattaagaagatgagtttttaataattgttagaggattttgtgtttttttattttatttttttttttttgatgagttttttgagttttttaaattgaggagtaagttaagttttttagtgaaatatttataggatttgttttgtttagttttaaatattattttttgtttggttatttattgtgttagggagttatttttagtgaaaaataagatataggttatattttttagatatttataattatagtggtaaggagttatttttttgttattgtaagtggttaagtatagattgggtttttatatgttagggttgaaaatttatagggaaatttgtgagttgggaggtgagagtagaagagtttcgtagtttttttttattttgatgtatttattattttaaatttagatttttatatatatatttatcgtttttttttatgataatagttgtttttatttttttatttttgttaatttttataaattaataaagattaagaaataaaataaattaaattttataggtgttttaaatttagtaataatttttagttggtttttaaaataaaaattaaaatataaatgtaagaaaagtttagaatgtttagtatttgtgtgatgaaataatttgtatattaaatttttaagttatgagtttatttatataataaatttgtatatgtatttttgaatataaaataaatgttgaaatatttttaaaaaggaaataaaagtttggaataaatgttaaaataattgtattgtatttttgaatttatatgttttaaatgaaaaatattattaataaagttatatattttatagttttatgtttataaattaagatagaaattttaaaattgttaagagttttaaaatttgaaggatattttttttttttttttaattttgtatttttttttattttttttataataagaaaaagaaaatgtttatttttttatttttatgattttaaaaataattttatatttgtgttatagaaaaattaagattttaatgggagagaaaatttttttattagtttcgttagtagtcgtatgattttagtaagttattaatatgtaatttttttgtatttttttatttgtaaaatgtatgatatgtatttgttttatagggttattgtgataatttagcgagtgaaatatgtaaagtatttagaaggatgtttggtataagtaagtgtttaataaatgttagttgttattgttattattattattgtgtagggttaggatgtttagatttttaaagattaggaagtagtttgatttattagtgataaattttttattttgttttttgtttttttttttttataattgtttatttgttttgtattattttttttatggtgttgttttttttttttttttatatgttttttttttgattttttattttttttttttttatatttataagtttttatttattttttagttttgattatttgtatatttaaattgatattttgtcgtgtttttttttattgtttttatgtagcggattatgtgttaatttatgtcgcgtttgtatagacgtatagattaataggggagtttatgtttgaatttgatgaagatgagatgttttatgtggatttggataagaaggagatcgtttggtatttggaggagtttggttaagtttttttttttgaggtttagggcgggttggttaatattgttatattgaataataatttgaatattttgatttagcgttttaattatatttaggttattaacggtacgttttatttttgtttttttttttgtagtttaattggaagggatgagagggtttttttgttatttttagattaggaagtttaagtgttttttgttgtgtgattttttttttttagtggttatgggttgattttattatagtaagggtttgtattttttttttttaggagagagaaaggtgagtagagtgaggttggttagtggtgtgatatttttttttgtgatttagagttgttataaaatttaaggttgaggtagaggattatttttttttaagaggtggagtttttgtgatttattttagaagaggggtttaatttggtgttgtttttttttagatttttttgaggtgatcgtgttttttaaggagtttgtggagttgggttagtttaatatttttatttgttatattgataagttttttttattagtgtttaacgttacgtggttgtgtaacggggagttggttattgagggtgtcgttgagagtttttttttgtttagaatagattatagtttttataagttttattatttgatttttgtgtttttagtagaggatttttatgattgtagggtggagtattggggtttggattagtcgttttttaagtattggggtatgtaattgtttttttttttataattttttggtattttttattttaaagatttggtgttttttgtattagtttttcgtattggttgggttttagtttttttttcgttttaatatttaattaattggtttataatttttaatttttataattattttaggttattattatttttattgtattttttgattttatttttttattttttttttagaggtttaagagttaatttagatgtttgagataacggagattgtgttttgtgttttgggtttggtgttgggtttagtcggtattatcgtgggtatcgtttttattataaagtttttgcgttttggttatgattttcgggtttaggggattttgtgaaatattgtaaaggtgggaatgtaaagaggaggttttaggatttgtagaatgtaaggaagggaggaaaaatttaatttgataagtgtttattgattttttaatgggttaaaagtatttagttatataataataataatatcgataattaattgagtagttaatatggttaggcgttattttgaggatttatatttattaatttattttatttttatatatagtttttgaggtaggtattattatttttattattttatatgagagatatttatatttttttatatatatagagattttaagtattttgattaagtttttatagttatgaagtagtagggttagtttttaatttagaaagtttggatttaagattgtttatttattgttttatttattttattttgtgaaggaaaagattaagtttaaattttttagagtttattgttaaataatggagttagatttatatttttatatataattataatatagtgtggtgggtgtttgtaattatttattgtttttatttggatttattttatggtaatgtttatataaaaaatgtttttttagagattttataggtttttatttattataatatttattatgttttatatttttatatgttttgggaatttttttagtattagatagtgaatttttatgtagatgattatatttaatttattattattattgttatttatgttggattttaggtataaaaggttaagaattttttagtttattatatgattattattggtgttttcgagtttttttttttttttttgatttatttggttttttttatttttagtttttatttttatatttaattttttatttttattttataggtaaatattttaatgaatttgatgtttttttttatttgtatagattttttgtaatatgtagtagtgtttagtgtatatgtatttttaattaattaaaatggtattaaattatagatttaattttgtatatttagtttgttttttttaaattttttatagtattttattttatatgtttatgtattagtttattttgtattgttataaaggaatatttgaagttatttaatttacgaagaaaagagttttaaatggtttatagatttgtaggttgtacgcgaaatatggtattagtatttgtttttgttgggggattttggaagtttttatttatggtggaaggtaagtggagttagtgtattatatggttatagagggagaaagagatatagaaagaggtgttagtttttttttaataattaggttttatgtgtattaatagagtgagaatttatttattattcggagaggggataaagttatttatgagggttttttttatgatttaaatattttttattaggttttatttgtaatattggggattaatttttaatatgagatttggaagtgataaatatttaaattatattaatttatatatttatattgtttttgggatatttggattatttttggttttttattattgtaagtaatgtttgtattttatatggaattgtatatatatgtgggtttgatttgtatttttggaatgtatgtattttagaaaggggttgtagggttgttggagatgtagttttttaatttgattaaatattgtttatttttttattagaatggttgtatttatttgaattttttttgttagtattttaattgttttgtaatttttaaatggattttaatattggatattatttagttttttaatttttgttaattttatgtgtataaagaaatatgttgttttattttgtatttttttaattattaataattggggttataattaggattgattagttatttgggggttttttttttataaattgtttgtttatatttattgtttatttttgtattatgtgtttttattatttttttattgatttgtaggtgatttttatatagttttgttagtagttttttgttagttttaggtattgtaaatgtttttttttaatttgatttttggtaattgtttttttggttttttttattgaagagaaatttttaatattttgtaatgaagtttattaattgtatttttgtttgtgtgttttttttaaaagaagttttttttatattgagatattaaagatatttttaaaatattttttatagttttaaattttatatttattattttaatttatttgggatttatttttgtgtttgatggggattatgttttatttttttttatataatgggttagtgtgtttttataattattaaatagtttattttttttttataggttagtagtgttttttttgttatattgaaagtttttattataggtgggtttgtgtttgagttttattttgttttattgttttgtttgtttttttttgtgttagtgttttagtattttgattattatgatattgtagtgtgtgttagtatttagtaggataaatttttgtttattttttttagtttatatatatttataattatatttataatgatttgtaatagagtgaagtgaatgtagaatgttagatgttaagaggaagaatggaaaagagggttgggattagggtgatgtaggggatgtatttggtttaggtgtaaaatttgggggatattaaaagaatttagtaataanttatattttaatgaaatattttgaaaaggtaaaattaatgtaaagatatatgattaataaaatatttaaagaggagtatttaataaaaatggagaagtagagaagtagaagaattaggagaatatgttgttatatgagttaaggaattaaagaatttaggaaggaggaagtattgttgttagatgtttaatagaggttattttagaaaatttattttggtttttgaaatttttttaaagagtagtatatataatgtgagtaagtatttttcgtttattgtcgttattgatatggtttggatatttgttttttttaatttttattttagggttaagttttttttttgtttttagtaatgtggtttttttttttgtttgtatattttggagatatgaagtatgtgggatggttttatagttagttggggtttgagggtgaaatttaatgattttcgtgaattttttggtttttatgtgttttttattggaggattagggtatgtgtagggatgattattttttttttgggatttgaatagggtagagaaatgggaagttcgggtgtaaagggagtggggaagatgggttcgggtttatagtattgaatttaggaatgataataattgtgtgtgttgttgtaggtgataaaatatttgaatagaagaggatttaggagagatttgaattttagttgttttataaattttattttagtttttttttttattttatgtgaaaattattttagtggttgattgaattgttgattttttaagttttgtttttatttattattttaaagtagttattttttagtaaagtttttaataaatagaaattaatgatattttggtagtattaatatggagattatttttttattgagttttttattttttgtttttttttgaagaattttttattgttattttttcgagaatattttaagattaataaatattttagtattttagagcggggagattttgagttatttttattggaagtttaggattaggttatatgtgaatattattttttgaaggtgtggttttaatttttgttgtcgatgtggttattaaaggttttgattttatttgaacggaaaggtttgaggatattgatttagttttgggtttttttttaattataggatagggtggggtagagaaaggatatttgggggaaattttatttggatgaagatttttttggatgtagtttgaagattgtagtgtttgaagtttttgagggaagagatttggtttgtttggattaagattttaggtagattaggattttatttatagtttttgagttttttttttaaggttgtattgtaattatagtaatattttatggaggatttttttatatgataaattaagagttaagaaataaaatttttaaaatgttttaatttattgtaatttttattagttatagttattttatgtgggagaatttaaattatgattattagagtttttaaaggtttgagaatagtgatgattatgaagaaaaatattttatttgagtaaggattttgtttttttatgagtgtttattagatattacgatgaaaaaagtatgaaatggtaaaaatttagataaatataaaaatatgttttttagttttttttaagttaaaaaaggaattgtttaaagtaaaaattatttgggggtttataatatatttagaagtaaaatatgatgataatggtataaagaatagaagggagaaatggaagtataatgttgtaagttttttatatatgttaagtggtgtgttattatttgaaggtagaatgtattaagatgaatattttaagtttttgataattattgaaaaaaaaagaggtatagttaagaggttaatggagaagataaaatagaatattaagtataattaatttaaaataaagaaataaaaaagggaaagtttggtaagataaaaagaaaataaattgtaagatggtagagtttaaaataattatattaataattgaattaaatgtatatggtttaaatattttaatgaaaagggaaagattgttagaatgtataaaaaaatttataggttaattttatgttttttatataatgttttttttaaatatgaaggtaaagataggtaaaaagtaaaagaatgggaaaatatatgtatatcgtggaatgttatgtagttataaaaaaatgagtttatgttgtttgtggggatatggatgaagttggaagttattttttatagtaaattaatataggaatagaaaattaaatattatacgtttttattcgtaagtgggagtttaataattagaatatatggatatagggaggggaatattttatattagggtttgttagggtatggggagtaaggggagggagagtattaggatatatatcgaatgtattgtatggtttaaaatttagatgatgggttgatagatgtagtaaattatatggtatatgtataattatgtaataaatttgtatattttgtatatgtattttagaatttaaagtaaaaaaaaaaaaaacgaaaataatgttaattatggaagtattggtggttgtgttaatattagaaatataagatttagaaatattattaaggagaaagaaggatagtttataatgataaaagattattttattattaatatataataattttaaatgtgtttgttttagaaaatatgttttaaattatattatattaaaaatgataaaaataaattagaaatagataaatttataattatattttagtattttagtatttagtaaataataaaatatttaggaaaaaattttatgaggatatgatagatttaaataatattattaatgaattaacgtgatttaattaagatttgtagaatattttatttaatagtggtagaatatatattatttttaaatgtttaagaatattttataggatagattatatattgggttataaatatatataaataaatgtttaaataaataaatgtttttattgaaattatatagaatatattttcggattataatagtattaaattagaaattaataatagaaaaatattttgaaagttttaaatatttagaaattaaaaagtatattgttaaatagtatttggatttaaaaagagttagaaggaaaattagaaaatattttgaattgagtgaatatgaaagtatattattaaaattagtatgatatattaattatataataatttataattttatataattggaaaggagggaaattttaaaattaattatttatgtttttattttaagaagttagaaaaaaaaagttaaatgaattttaagattaataagattagaaataaatgtaataaaatggataaataataaagaaaataaataaagttaattgttggtttttaataaggtttaatatatttatgaatttttaggtagatggattaagaaaaagagataagatttaaatttttaatattagaaatggaagtgggtacgttataataaattatatagatattaaaagtattatgatagaatgttatgaaaatgttaataaataaaaatgataataaatttgataatttatattgttaaattaaattaaatttggtgtaaagttttttttatattttaaatttttatatagtaaattaatttaatttaatataattgcgttatgtaaataaattatagtttaatttaagagtgttgtaataaatagttgagttttagttaattataggttgttaagtgattatattatgttttttataagtaaatgttttattacgttatgtttatataaggtaaatattgagttgtaataaattggttggttttgagtattattttttgtttttatttataaatattgtttttatatgttgttggatagagttttttgaatttttttgggttttgagggttttttaatttatgaattgttttttgttaaataaattttgttaaatttaatttttttaaaatttttattttaataatatgaaatagaaatattttttgaacgatttaaattattaaaattaaattaagaagaaatttttgttaatggaagaaattaagtttgtaattttaaaaattttttttatagagaaggttaaatggtttttaggttagatggttttattgattaatttatagtattttgttataatattgttataatatttttaatgtttgtatgattaattttattatatatttaaggaagaaataatataaatttaatataaatttttttaataaaagagtagaagaaaatatattttaataatttataagtttaatatattaatattaaataatgatattaaaagaaaaggaaattaaagatatataaatatagttatgaaaatgtttaataaaatattttttaaaattgaatttaataatatattaaaaaggatgatataatatgattataaaagtttatgttaggaatggaaggtatgtttaatatgtaaaaaattaatgtgattttatattttaatagaatataaaagaaaaattatgtaattatgtaaatggatgtagaaaaaggtatttgtttatttatgataaaaagttttagaaaattaggaataaaaaggaattatttgataaggtgtgtttatgaaaattaataattgaaatttttaattttgggtgggggaggggggcgggtattttattttttttataaaattattaaattatttaatgtgaaagtggaatttagtgaagaaatgttttttattgtaaaaatataaaatgttggatattttgtgaatagtttttatgtattttatataaatgaaattattaattatataatatatttattgaaaaaagaagatggtttttttttttttttttaatggttgttgaatttatttgtttgattaataatggttttggtaaaaattgattaatgttgagatatttgtaatgaaatattaattttaaaagtttatgatattttgatagaaattagagtttatataaataaaaaaggaattttcgatatttttagtagttataaggtgaatgtattgagatcgataggatagtaagaaggtatttgtatatttatatttgatattagattatatttttagttattagaatattttttttttatattttaaaaaatagtgtttttttttttttttttttttacggtttttttttttttttttttttttttttttttacggtttttttttttttttttttttatagtttttttttgatgtcgagtcgaagttggacgatattgttgttattacggtttattgtaatttttttgtttgatttttttgttttagtttgtcgagtgtttgcgattgtaggcgcgcgtcgttatatttgattggttttcgtatttttttggtggagatggggattcgttgtattggttgggttggtttttagtttttaatcgagagtgattcgttagtttcggtttttcgaggtgtcgggattgtagatagagtttcgtttatttagtgtttaatggtgtttaggttggagtgtagtggcgtgatttcggttcgttataatttttattttttagtagtttgttttggttttttaaagtgtcgagattgtagtttttgttcggtcgttatttcgtttgggaagtgaagagcgttttcgtttggtcgtttatcgtttgggatgtgaggagtttttttgtttggttgtttagtttggaaagtgaggagcgtttttgttcggtcgttattttatttaggaagtgaggagcgttttttttcggtcgttattatatttgggaagtgaggagcgtttttgtttggtcgtttatcgtttgagatgtggggagtatttttgttttgtcgtttcgttcgggatgtgaggagcgtttttgttcggtcgtttcgtttgagaagtgaggagattttttgtttggtaatcgtttcgtttgagaagtgaggaattttttcgtttagtagttattttgtttgggaattgaggagcgttttcgttcggtagttatttttttcgggagggaggtgggggggttagtttttcgttcggttagtcgtttcgttcggtaggtgaggggcgtttttgttcggtcgtttttattgggaagtgagagtttttttgtttagttagtcgtttcgttcgggagggaggtgggggggttagttttttgttttgttaatcgtttcgttcgggagggaggtgggggggttagtttttcgttcggttagttattttattcgggaagtgaggggcgtttttgttcggtcgcgtttattgggaagtgaggagtttttttgtttcgttattatttcgtttgggaggtgtatttaatagtttattgagaacgggtcgtgatgataatggcggttttgtagaatagaaacgggggaaaggtggggaaaagattgagaaatcggatggttgtcgtgtttgtgtagaaagaggtagatatgggagattttttattttgttttgtattaagaaaaatttttttgttttgggattttgttgatcggtgattttatttttaattttgtgttttttgaaatatgtgttgtatttatttagggttgaatggattaagggtggtgtaagatgtgttttgttaaatagatgtttgaaggtagtatgttttttaagagttattattattttttaattttaagtatttagggatataaatattgcggaaggtcgtagggttttttgtttaggaaaattagagatttttgtttatttgtttatttgttgattttttttttattattgttttgtgattttgttaaatttttttttgcgagaaatatttaagaatgattaataaaataataataataaaaaaaaaatagtatgttgatttttataataaagattttttttatataaaaattaaattatggttagaagatattttttttaaattggatgttagatgagtatgttgaatataaagtatggtttgtagagaagagatgtttttaataaaaaaattaaggatagagtttgaggtaatgacggaatatttagacggatgtgtttagtatatatattgagatgaagttagagattatatattaatgggtttttttgtggtattatgattgatgttatgagggtgattgagatttgtaggagaatgagtgtagagagatgagtaaagggttgaagattatgttttaagtatgtttttatttaaaaatgggaaatggaggagtagtgtataaaggagtatgtattattttttgttttagcgttttggggtaaatagggtaaggaagagagggttatgggaagagaatgatttgtttttttattttatttataattatttggttgattattaattggataagattaaatagtttgatatatttgttaagggatttaatataatattagtttgtattaatattagtaatatttttgtaataaggaaggtgatagattttttattttttgtttgaattttatttgaagttttgtatatttagatatagatttttaagaaaaatttgtattatttggatagaggtataaaggaaaatggaaaataggagtaaaatagtttaaagggttgtgattttggagttattaaagaatttggttaagtttggtttggtgaagtgaaaaaagtagaattaggattggtttaagaatttttgattttaaataattatattttaattatggaggttttaggaggttaggtaggggtgtgttgttttatttatgagaaaagtgtacgtacgtatttttaaatatgtaaggtatatgatgattttttttttattgttttgagtaggatgatttgtttttagtagcgtgtagatggggtttatgtaagttttaagtattcgtgtatgatagaggaagaaaaggtttttttttaggatgagagaattttaaataagattattttagtttatttttttatttgttttttttttttgtttttagtttatatagaaaagttttttttggtatttaagtttaattgtttttattgtgggatagtggaggttgtgtattatatttataaaaattatttgtttttattttttttttgaaaaggtagtattgtaatatttttttttttgttttttttttttttttttagttaggggttttattgtttagggttagaatatatagttaattaaaaaaatttgttttataaagggattgttgaatatttaattgtttgtttgatggttgaagttaagttttaagagtgagagtaaaatgtcgatggagaaggtttggagaaagttgtgatgataagaattattatttttgtttaatgattttttttttagttaatgagatttgagtgtgaagtatttttatttgtgattaggtaataaaggtattgagattgttttgagtgagttgtagagaagggagaggtatggtatgttattaagagaatagttttgttttatagtgggaaaatgtattagagtgttacgtggatatagaagtgagagaattgagggttgaagtgggtttttgggaaggttatattttttgttgttgagaaaatttgaagtgtatgttaattagggttagaattgttgttttataggaagtagtattttgtgtagttattaattaaagttgttttgtttggatttttttagtattttgggattgataaatagatatgaataataaatgggtaaatttaggtaaggtaaaattaaggagaaaatatagaaatagtgtatagaaacgagttagagaagaataaaatagaatataagtataagtttttttatttgttggtatatgggaatagttttggtgtatgttaaaatagtttttttttggagttttaggttgtaaattgttaaggaaaatttgtttggtgttggagttcggagtttttattttttttttagttatagtttttagaggtttgtttaggtttttagaagtatagtatttattagttattttgttagatttattgtgaaatttggtttttatattcggttttataatttaatgttggattaaaaagattggttggttttttagaagtttttttaaattttattgagttggaaacggttagagaaagagttgtttattttttgaggagtatttttgagttatttttattttataggttttaatataaaaggtgttaattttagaggattagaatttaattagttatggtaaatagaagttatatttttgaatttggaaaattaagatatgtatatgtatttattgatattaatatttatttaataagtgtatacgtttttttgttgattgaagtgtatagttgtgtgtagtaatacgtttgttaggtaaggtagttatcgtttttatttcggttttgtattttagaattagtaaataatataagataattatgagaataattagtaatatttttttttagttaaagagtgaattttaggagcgggggtttaattaggagtgatgattttgtatatttttttatatggttgtttgttgggtgtgtagatttatagtgggaagggattttaaaattttagtttgaagttgttttatatttgttattaaattgttatgaaatgttttttagaggtgttgttttattttattttaattatgtattgattgattttatgatagagaagtgacgtagatatgtttatgcgtttagtcgtagtttagttgttgttagaatattagtgtattttgttatttttttatatattttagggtagttttaagggttttaagggtttgtagacgtgtaagaattttttgttttatattttgttgtaagagaagtttattagatatatttttggttaaattatttataaaagtatttatttgtattgatttagtaatagttgttatagttatattagtagttgttaggatgattgtggttgagattataaaggttgtaagtgtgtttatgtattttttgggtttggtttaggatagggtatatttttaggtggtaagggtagaggaattttgttaatcgtatgttaaattgattgggtaggaatgttttagattgtttttttaatattatgatattagtaatatttaaattagatgtattataattagtgatatatgaggtaaattaagtttgtttttgtatttgggttataaatgcggagttttggggtgtaatggaagtattagtttttataaggaaaatatatgtatgggtagtataaattaggtattgattagtgtgattatgaataaaggttatagtgtatttgttattggaattatgatatgttttatgttaggtgaaaaggaggtgttaagatgttttaggtatcgtaaagtgttttgggtagtatggattttatttggggtatgggataatttattttttttattggtttaaattataggggaacgtgatgaggttataaaattgtgattaatattatgatagatgaggatattagtaaggatgttttgaaaatggtcgtgggggttttagtttaaggtattataatggtttagttggaggttataagtttatttttcgtgatagattttttagttaaagtggaatttattatttttttagttttattttttagtataggaaggaatgtttgggaaagaattattgattgtattatttgatttgaagttatttgtagttaagattttaaaggtattttttttgttatgatgtagttataattgtgtttgggtaggtatatagtaagggttataatttttataatttatatatagtgggaggatagtggagtgatatgtagtgtgtttggtattttagtttagtgtatgttattatcgagggattttattgggggtaaatttattttttttagttaagtagttatgttattaaaagttgggaagggagtgtttgtttaggtgatagggtgaaagaaaggcggatttaagatatgagtttaatagagtgtagtaggaataggttgtagataaagtacgagtataaaaaggattaatattttatatgagttgtaatgtataatagaaattatagtaaggagtaaattatttggagtgaatggtgtttgtgtttagagtagggtttatttagttttttgagttgttttttttagtattttttagtaatgtttagggtttgtgttatttacggaagttgtattattcgggatcgtgggttttgtagggttagtttttttatttttggtatcgggttgagttttagttatgttatggtatggtttgatgtgttttgttggaatttaaagaggatttgagggggtgtggatataagtatatttttttttttaagttaataatttatttggattatattatatattattgtttatatttttttataaaattgtaggttttatgttttgagaggttttagtaaaaagtgtttttttatagttgattgaaatttgttatttatattttaaaaattaagggtaaataaggtttgtgttaatagtgttgtagggtttttatttatatttttttttttttgttttttgagtatatttttaaggttggagtgggtacgttttattatggttcgtttttgggggttatacgggatgtttatggaacgttggatattttacgtgtgataaaattgttgaaattgtgagttggtataaattggattattattagttttaatttttatgggtcgttttatatatgtaaaagttgaaagaagatgtttaatgatatattgagtggattttttaaggaagagcgtgtgtattaattagatgagtgttggtattaatggatatatgtatatattttagttttttaattttagggatgtaatttttatttgttataattgattaggttttaattttttagggttaatattttttgaaggaggggatatgtttgttagttggtaatttgagaattgtgggataatttgtttagttagtttttgggtaagttgaaattgtttagataagtttttttaattttggtggaaaaattgatgcgattgggtggtttggttaagtagtgatgttattatttgaaggtttttttgattattgttataagttagtgggttaggtagtgagttgtggattcgaatgtgtgtaataaaaataggatgtgtatattgatttagtaattgttgaaattagagaaaaagagtatatagggtaggttttagagtggatttaattacggttgttttaagattttgtaataaataaataaagtaggtagaattattaattatattgatggttgagtagaaaaagtttttaaggttaatattagggtttcgattttatttttttgaatgttagtaaatttagattgagtgagtgaattatgtggtttttattagattgtcgtttttttatgtttgtttgaattattagaaaataatgttaaagtattaggtatggaggagtgaattatttttgttggtaagattataggagtatgagataagaaatgaaggaatttattagtaggaagaatatgttttatttgttttgtgtaattagagagagttatttgtagatttaataatagggataaaattgtttttaattgttttttatttaaaggaattttgatgattttaggatattaggattatagtttagtaattgattgtattgtttgaggtttgaatatacgattttattaattaattgaatgtagggaaagagtgttttagttttggtatgtgagtaaaaaaaaatttattttagaaagcgtagttttggggttatcggttttattaattttgaaggggagtgtttggtggggaaaataaataattggatgaaataatgggtgtttatgtgatttagttgtttttgagagatggtttgttttatttttttaatttttttttttgttgtagggtttaaatatttgggagaatttagggttatattgttttttaagatagaaaataggttttgtagtttataagtaggaatgtttaaagtggggtagagttagttgatattatttagtaatttttgataattatttaaggaatgtaagttgttagtatttaatttaatattttgaggttttattgattaggaagttagtatgtatttaagatatatttttaaggagagaaagttgtatttttttaggtgtaatgattaaattttttagttgtttattttttatgatagaggtatataaatttaaaagtattggttttgttggggttgttggtaaaatatttataaaacgaataattttgtaattaggaaatttttttttattgggagtaaagtttgatttatatgatattgatatttggtaggattgtttagtattttttgaggaagtatattttaatgaaattaataagttggttttttattattgatagttggtattgtaaatgtaaatttttttttgttttgttttgttgggggaattatataaaagtagttttttaagttaataatgattataggttaatttcgaggaatcgttataggggatgggaggttttgttgaaggggttttataggttgtaaattagtattaatagtatataggttatgtaaaatttttattttttagattttttgggaatgatgaaaatgggtaaattttaaggataaatagatggttttatatgtttagtttttaattgttttttaattaatttataggttttttgtaatttttttttttttagaggttattgttttatttaaattggattttgagagagttacgacgggggtaggggaggaataataatagtggttattgttataaagggggttgagagttatttttttcgtattgggttaataaattttgtttttaaagattaatagggatgcgtatgtttacgggttgtataattgttttttttttttttgaattgtaataggttagggggtgtatgttttgtttggttttgtgtgtttttttgatgtagattattttttatttttgagtgatttaaggttaaatttttagttagttttgattattaatgattgaaacgtttatttttgtgtttaataagttagtaaaattattatttttaatttttaagataattatgggtttttgattagtgattaattgatttttatatatttttgtggtttttgtgtttttaaaatttttttttttttttttttttcgtgggtattggggatttagtatggtaaaattagtaattgagttatttttgatttagggggaagaatatttagatttttatattttattataattaatattttattttggtaattattattaattattttagtgagtatattaatttttttattggataggttagatcgttttaggattaattttattgtttttggaggtagttggttttagatttcgtatgtagtttttttagggtttttttttttttttagtattgatttgttggggtagagtaagtttagttttgtatttttagtggtggttgttttgagagagaggattgtgagttttttattagatcgaggaaagttggtgggattgttttagtttgaagtagggtttagggttagtttattatgaagttttttatttggttatttatggggtttttgtttttattaaattttgatttgtattgatttgtttaatgttttatcgttttatattcggggtatatagaagggggttttttttttgagttattttcgtttttattatgggggtattttttttttatatgatttggttttttatatagaaaataattttggtttttttttttttttattttaggaggttttaatgttataattaatattttggtttgtgtgttttagtttttattagttgatatgtttatataagtttttcgattgtggttgttttttttttgattgtttgtattgtttgttggtgatttatatgagagtttttaaaagttaattgtaataataagatattagtagtttgggcgtgattaatttgttttttaattgtttgggttaattaattgaaaaatttaataaatggtttttgaggtttttgttgaatatttataaaagatttttgttaaattttatttttaggaatttagttttaagttttgagagtatataaagatatttgattttaggtttggggaattaaaatttagtcgttgtatataggtatggggattttttttttggagtatagtagttgttaggttttgtttcgtcgtttgattttggttagtttgttgtttatatagtttattatattttgttttttagaggaggtattggttaggttttaaagttgttttggttagtattgtttagttttatggggttatagaaaagtggtttgttaaggttttaattattttttttataaatgggttagtagttttgttttttttaatgtttttttttagttttttataagtattaaaagaaatgggtttatgtatttgattgttttgtcggttttgtattattaggtaggttaagagttttttttttaatgttatttgtttaagataaggttttatagttggagtatgttttttgtttttttttttatttattggaggagggggtttaggtaaaatttttattttttttttgttattttggtttggtgatattagggttgaggaatttgcgggtggtaaaatatatgatggtgttttgttttttttttttttaggtttttttgtgtataatgggattaaagtcgtttttattaaggtttatagtattaaagatgatattgggattcgttatttttgaatatgatgttgtttaagatttttttttattcgtttttagagttttaggtttagtatgtttttttgggggaattatgggttatgggatataatagtttgtattaggttttttaattaaatttgtgaaattgaggttttgttagttttaagtagttattttaatatttttatatattgtttttgttgagttgataattgttgttttatgatgaaattttagtttgaataatttttcgtttcgaatttggaaattttaagtaagtattaatgatttattgattatttattgattgcgtagttttttttttatttttatttttagggggtttattaatttttttttgtagtattttttacgcggggtattagttgtggtagtttgatttatagattttgatttagtaatggatgagaggtgtatattgatatagatattttgtttgttagtttagttgagggtttaggttatatatagatattaaggaaggtgttgtaaagagttgtatttatggttttgattaattagtaaagttcgtatttgtttatattattagagggtaattgatttgtttgtcgatttttttaagtagagagtaattatgtatttgtagttgattaaatgttggttttacgattatatgagtaaataagttatttagataaatgtttttttgtatttgtgttttaagtaattaatttaaggtaaggattacgttgtttttagttataattttattttgagatttttgtaaatatttttcggttttttaagaaggtttgtgtttatattttataattttataattttttttattattttgattgaatttttatattagattaattaagaaaagaaaagagaatatttaagtaaattatattataaatgaaaaagaagttattataatagattttatataaatataaaagataattagaaattattatgaataaatatatggtaataaattggagaaataagaggaaatggataaatttttggaaatatataatttattaagattgaattaggaagaaagaaaatttggatagattaatattgagtattgaaatggaattagtaataaaaaattttttaaaaaagaaaaatttaggagtatatagttttattgataaattttattaaatttttagagaattattatcgatttttttttaattggtttaaaaagttgaagaagagggaatttttttaaatttattttgtgaggttagtattattttaatggtaaatttagataaggatgttttaagaaagaaaattataggtgaatattttgatgaatatagatggaaaaatatttattaaaataggagtaaatcgaatttaatagtagattaaaataataatataatgtgattaagtaggatttatagtaaggatgtaaggatattttaatatatataaattaatgaatgtgatatattatattaatatgatgaaggttaaaatttatatgattattttaataaatgtagaagaagtatttgataaaatttaatattttttcgtaataaaaatttttaataaattaggtataaaaggattatgttttaatataataaaggttttatgtgataaaatttatagttaatattatatagaatggtgaaaagttgaaagttttttttttaggaattgggaaaagataagtatatatatgtttattttttttatttaatatagtattattttatttatttaaggggggttgtatattagttttgttttttgtttgttatttttttggtaagagtttataaagtaagttttaaaataattttatatttagaaaaattaaatattttattagaatatttttagaattgataagttaatttagtagatttggtaggatataaaattaatatgtagaaataagtagtatttttatttattaataatgaaatagttgaaaaagaaatgaagaagagaattttatttatgatagttataaaaaatatgataaaatatttggaataaattttattaaagaggtgaaagatttttataaggaaaattataaaatattgatgaaagaaattgaagtggatataaataaatggaaagaaattttatgttaatggattagaagaattaatattattaaaatgattatatggtttaaagtaatttatagatttaatgtgatttttattaagatattaatgttattttttataaaaatataaaaaataattttaaaatttgtatagaattataaaagattttgaataggtaaagttattttgagtaaaaagaataaagttggaagtattataatatttgagtttaaaatattttataaggttgtagtaattaaaagagtagagtattggtataaaaaatagatatatagattaatagaatataatagaataggggatagaattatggtggacgggaggtattatatattgtttttttaatttggatggatagagtagtttgtggagttttgtattatgaatttttgttttagatttattgtaggaatgattgggaaagttgagagaatttatagattttttgaagggagtagattgtttttgtaggatttgggagatattttaaatattgtgagtgtttaaattgtggaggtgggaaagggggattttttatttttgaatgtatattttattggggaatttgaaggtgtagattatgggagaagattttgatttgaattggagttgagtttatttagaagttgagggaaatataggggtagaggaagtagcggaagggatttgttttgggtattaatatttggttttttgttatttatgtaaatttttgtagttggtttgaatttttttttagaaaatgggattttattttttatcgtattgttaggttgtaaattttttaaatttttatgttgttttttttttaaaattgaatgtttttaatagtattttagttattttttgaatgttttgttgtttagaaattttttttgttagatattttaaattattttttttaagtttaaagttttataaatttttagggtaggggtaaaatgttattagtgtttttgttaaaatataataagagttatttttgttttagtttttaataagttttttatttttatttgaaattattttagtttggattttattgtttatattattatttaataagtttttagaaagttttatatttttttatatttttttgtttttttttgagttttttaaatttttgtaatttttgtttgttatttagttttaaagttatttttatatttttgggtattttttttgtggtgttttattttatcggtattaatttattgtattattttgtttttatattgtcgataaagatataattgagattgggtaatttataaaagatagaggtttaattggatttatagttttatatggttggggaagtttgataattatggtggaaggtaaggaggagtaagttttattttttttggatggtggtaggtaaagagagagtttgtgagggtaatttcgttttcggaattattagattatttgagatttatttattgttataagaatagtattggaaagatttatttttataatttagtaattttttatagggtgttttttataatacgtgggaattatgggagttataaggtgaggtttgggtggggatatagatttaaattatattattgtagaataaatggatttaatagatatttatagaatattttatttaataatagtagaatatatattatttttattagtatgtggaatattttttaagatagatgttatggtaggttataaaataagttttaataagtttaagaaaattaaaattatatgatgtatttttttagattatagtggaataaaattggaaattgaatttaaaatgaatttttagaattatataaatatatggaaattaaataatttgttttcgaatggtttttaggttaataatgaaattaagatggaaattttaaaaatttttgaattgaattataatagtgatataatttattagaaattttaggaaggtcgggtacggtggtttatatttgtaattttggtattttgggaggtcgaggtgggtggattatttgaggtcgggagttcgagattagtttggttaatatgatgaaattttatttttattaaaaatataaaaattagtcgggtgtggtggtgtgtgtttataattttagttattcgggaggttgaggtaggagaattgtttgaatttaggaggtggtggttgtagtgagttaagattgtgttattgtattttagtttgggtaataagagcgaaatttttaaaaaaataaaataaaataaaaataaaaattttgggagatagtaaaagtggtgttaagaggaaagtttatagtattaaatgtttatattaaaaagttaatttagatattaaaaagttaatatagataatttaaggttattttttaaggaattagagaaataagaataaattaaatttaaatttattagaataaaataaatagtaaagaaataaatgaaattgaaataaattttagagtagaaataaatgaaattgaaattaagaatataaaagataaatgaaatgaaaagttggttttttgaataaataaataaaattgatagattattagtaagattaattaagaaaagaagagagaagatttaaataagtttaattagaaatgaaataggagatattgtaatcgatattatagaaatataaaagattattgaaggttattatgaatatttttatgtagataaattagaaagtttagaggagatgggtaaatttttggaaatatataatttttttagattaaattaggaagaaatagaaattttgaataggttaatagtaagtagtgagattaaaataataatttaaaaattgtttaaaagaaaaagtttaggattagatgtatttatagttgaattttattagatagttaaagaagaattggtattaattttattgaaattatttaaaaagatagagaaagagagaattttttttaatttattttatgaagttagtattattttaatattaaaattgggaataggtagaaaaaaaggaaaattatatattaatatttttgatgaatataggtgtaaaaatttttaataaaatattagttaattgaatttaatagtatgttaaaaagataatacgttatgattaagtgggttttatattagggatgtagggatggtttaatatatgtaagttaataaatgtgatatattatataaatatagttaaatataaaaattatattattaatttaaaagatatagaaaaaatatttgataaaatttattatcgttttataattaaaattttgagtaaaattggtatagaagggatatatattaatttaatgaaagttatttatgataaatttatagagagaattatattgaatagggagaagttgaaagtattttttttgagaattggaaggagataagaatgttgatttttatttttttttaaaagaagatatttatgtagttaaaaaatatatgaaaaaatggttattattattggttattagagaaatgtaaattaaaattataatgagatattattttatattagttagaatggcgattattaaaaagttaggaaataataggtgttggagaggatgtggagaaataggaatatttttatattgttggtgggattgtaaattagtttaattattgtggaagttagtgtggcgattttttagggatttagaattagaaatattatttgatttagttattttattattgggtatatatttaaaggattataaattatgttattataaagatatatgtatacgtatatttattgcggtattatttataatagtaaagatttggaattaatttaaatgtttaataatgatagattggattaagaaaatgtggtatatatatattatggaatattatgtagttataaaaaatgatgagtttatgttttttgtagggatatagatgaaattggaaattattatttttagtaaattatcgtaaggataaaaaattaaatattatatgtttttatttataggtgggaattggataatgagaatatatggatataggaaggggaatattatattttggggattgttgtggggtggggggaggggggagggttagtattaggagatatatttaatgttaaatgataagttaatgggtatagtatattagtatggtatatgtatatatatgtaattaatttgtatattgtgtatatgtattttaaaatttaaagtataataataataaaaataaaaaaagaaaaagaaaagggaagttataaattaaaaaaaaaaaagataaaatataggattggaagttttagttagaataattagataagagaaagaaataaaggatatataaataggtaaagagaaagttaaattattattgtttattaatgatatgattatatattttaaaaattttaaagatttatttaaaaagtttttagattcgaaaaatgaatttagtaaatttttaggttataaaataaatgtatataaataagtagtattattatatattaatgattaagttgagaattaaattaagaatttaattttttttataatagtttttcgaaaataaatttaaaaaatgtttggaatatatttaattaaggaggttaaaaatttttattaggaatattataaaatattgttgaaagaaattatagatgatataaataaatggaaatatattttatgtttatggatgggtagaattaatattgtgaaaaggattatattgtaaaaggtagttataaatttaatgtaatttttattaaaatattattattattttttatagaattagaaaaaataattttaaattttatatggaattaaaaaagagtttatatagttaaagtaagattaattaaaaagaatagatttggaggtattatattatttgattttaaaatataatataaggttatagttattaagatagtatggtattggtataaatgtaggtatatagattaataaaatagaatagagaatttagaaataaatttaaatatttatagttaattgatttttgataaagtaaataaaaatataaagtggtaaaaaaatattttatttaataaattgagttgggataattggtaagttatatgtaggagaataaaattggatttatgttttttattttatataaaaattaatttaaggtagattagggatataaatttaagatttgaaattataagaattttagaagataatatcggaaaaatttttttagatattggtttaggtaaggatttaatgattaagaatttaaaagtaaatgtaataagaataaagataaatagttgagattttaattaaattaaagagtttttgtacggtaaaaggaatagttagtagagtaaatagataatttatagagtgggagaaaatttttataatttatatatatgataaaggattaatatttagaatttataatgaatttaaataaattagtaagtaaaaaataaataattttataaaatatgagttaagggtatgaatagataatttttaaaaaaagatatataaatggttaataaatataagaaaaattgtttagtattattaataattaggaaaatgtaaattaaaattataatgtaatattattttatttttgaaagaatggttttaattaaaaaattaaaaaataatagatgttggtaaggatgtggtgaatagagaataattttttattgttggtgggaatgtaaattggtataattattatggaaaatagtgtggagtttttttaaagagttttaaaagtagaattattatttgatttagtaattttattattgggtatttatttagaggaaaagaagttattatataaaaaagatatttgtatatatatatttatagtagtacgatttataattgtaaaaatgtggaagtaatttaatgagtggataaagaaattttgatatatatatatatatatatatatatatatatatgatggaatatatatatatatatatatgatggaatatatatatatatgatggaatatatatatatatatgatggaatatatatatatgatggaatatatatatatatgatggaatatatatatatgatggaatatatatatatatgatggaatatatatatatgatggaatatatatatatatgatggaatatatatatatatatgatggaatatatatatatgatggaatattatttagttataaaaaggaatgatttaatggtatttgtagtgatttgtttgagattggagattattattttaagtgtagtaatttaggaagggaaaattaggtatcgtatgtttttatttataagtgggaattaagttatgaggatgtaaaggtataagtatggtataatggattttggggattttgtaggaaagggtgggaagggggtgacggataaaagattataaattggttgtagtgtatattgtttgggtgatgggtgtattaaagttttaaaaatttttattaaagaatttatttatgtaattaaatattatttgttttttaataatttatagaaataaatttttttaaaaaaagaatagaatagaatagaaaatttagaaataaatttatatatttatagttgatttatatttaatgaagttatgaagaatatttattggggatatgatatttttttttataaatggtgttgggaatattggataattatatgtagaagaatgaaattggatttttattttttattatatataaaaattaatttaagatagattaaagatttaaatgtaatatttgaaattataaatttgttagaagaaaatatagaaaaagttttttaggaaataggtttaggtaaagattttatgattaagattttaaaagtattagtaataaaattaaaaatggataaatggaattatattaaattaaaaagtttttgtatagtaaaagaaataatttatagggtgaagagaaaattttttaaatgggagaaaatatatgtaagttatttatttaataggggatgaatatttagaatatataaggaaattaaatatttttatagtaaaaaaataaataattttggttaggtgtggtggttaatgtttgtaatgttagtattttgggggtttatagtaggaggattttttgagtttaggagtttaagattagtttaggaagtatagttagattttagttttttattaaaattaaaaagaattaaatagtttggtatggtgatatgagtttgtagttttagttgaaggattgaggtaaaaggatagtttgaatttaggaatttgatgttgtagtgaattatgggattattgtatattaatttgggtaagatttagttttaaaaataaataattaaattaattaattaattaattaataattttatttttaaaatgagtaaagaatatgaatagatattttttaaaagaagataggtatttgttttttttattgagaaaagaaaaatgagagagagtaagagaaagaaaagaagatatataaatggttaataggtatatgaaagaatgtttaatattattaattattagggaaatgtaaattaaaattataatgaagttaggttatagtggtttatgattgtaatgtcgatatttttagaggttaaggtgggaggatcgtttgagttaggagtttgagattagtttaagtaaagtagtgagattttattattataaaagtaaaataaataattataatgagatattattttattttagttgggatggttattatgaaaaagataaaataaataaataaataaaataaaaaaattataggtgttggtaaggatatggagaaaagggaatttttatttattattgtttggaatgtaagtaagtatagttattatggaaaataatatggagattttttaaaaaattaaaaatagaattattatataattaagtaattttattaattagtatttatttaaatggaaaagaaagtaatgtattaaagggatatatatattttttattgtagtattatttataagagttaagatatggaattaatttaagggtttatgaatggatgaatggataaagaaaatgtagtatatatagataatgaaagtatttagttatttaaaaagatgaaattatgttatttgtagtaatatggatggaagtggacgttataatgttaagtgaaataagttaggtataaaaaaataaatattatatgtttttattcgtatgtgggagtttaaaaagttgattatattagggtagagagtagaatgatagatattagagattaggaagtggacggagatatagagatgttggttaatggttatgaatttatattaatataaagaataaattttagtgtttgatagtagagtagggtgattatagttaataataatgtgtagtattttttaaaaaaattagaagagaggatttgaaatgtatttaatgtataaaaatgataaattgtgggtgatagatattttaaatattttgattttattattatattgtatgtatgtaataaaatattatatataatttatgaatatgtttaaatataatgtattaaaaaattttagaattaaaaataaaaattaaagtttttaatttaaatatgtagtttagtttttattttatagaaataaagtataatgatatttttatttatatattttaaatttttagaatttatattattacgtaaatgaatatattaaaatattaagatatatattttttatttttaaattataattagttggtaaataggtaaaaaaaagatgaataaatagagtgataagaaaaagaagataggagagagttaaatttagagaaaaaggaaagaaaataagagtaagtataggaatgaaattgtttttatatagaggttgatttatttttaatttaaaaagatttaatattcgggatttttttttgtaggagttttttaatattatatatttttgtataatttgtaaaaagtaagataatttaatagtaaattgttaagattgttgtatttttttattttgattttttatttattatatattttgttttttgttaggcggtaatagagtgattatagatattttagagatttaaataagggaaagttaagttggggatatataaggtagaaaatgtatttatggttttatatttattttatgtatagttaaattattatacgggtttaattagggatatagataggtttaaattaaggatgattgatttttatattaatgattttagaatttttaatattgtgttttatgtgtttattaattattataggttttgattttttaatgtaaagttataataagatattgttatttgttaatatttgatattgtttattttttttttatttagcgagaggtagagaagtagtaaataaaaggtattaatttattattttagttatttattttttgttacgttattgtatattatattttagttatattggacgttttatttttattagattatgtatttgatgtatttggttattttttttttttagttttaaatgaatttgtttaagtatatttatataggttattattaattttttgttggtattatttgaaatattgatattgatgaagataattttttatttttaatttattatgataataatgatattaatgataaattggttaatgagtgttattaattttaggagtatttaagattaatgattatcgtatagtaattgaagaggaataaaattattttttttttagttttagatataatgtatgtttgatttattgtatttttttaataaggagtgattatggtttgttggttaaagtggtagattatggtagttataatatattattcggttattttttagatttatattatattaatgtaatatatatatttggttattggaagatgtttaatattaatttttatttttgaaataagagattatgaaggaagagattagtagaaagatttgagtttttaattttatttttagttgttaataaaaaataatatcgtagattgtttttttttttttggttatgatggaatagtttgtataatattaatgttttttttaataataatgagtaaagttagataaaatataaaaaataggttaggtatagtggtttatatttgtaattttagtattttaggaggttaaggtaggaggattatttgagtttaggagttttaagattagtttgggtaatatagtaagatttagattttataaaaataaaaaattaattgggtatggtggtttatgtttatagttttagttatttgggaatttgaggtaggaggattgtttgaatattggagtttaggaagttgagtttgtagtgagttatgattatattatcgtattttagtttgggtgatagagtaagatttttttttaaaggaaaaaaaattataaaaaatatacgtttgagggaattataaaatttttaaggtgatgatagtttgagaagataagattatgaaaagaagataataagagaggagttaatattttttagttgttttatttttaaagattattttatttttagggtagagtaatagattgataattttagtaaataatttatggttatggagagataaagaatggtatttggggttgttaaatttaagggattaggatgttagtgaaatagtagataatgatagttagaaaaagtttaaattttgttttaagttagatttattttagattaaaataaggattattttttattttatatgtttaatagaggatagggttaattttttttggaagaaaagtgtattattgagaaaaataatgaataatttaattattggattagagataaattttataatagttataatgaatatgtaaaaagataatagaaattataatgaaaaattttattaaagaaatagaatgtatagaaaagaattaatagaaattttagaattaaaaaatgatgatataaatttttaaaaatttttatagatgggttaatattggtaaaaataataaagtaagaatttttaaaaatttttttttttataaaagtaataagaaaagtgataaaaattgaaaaaaaaattaatttttttagaattttggaaattaattaaagttttgtagtaatttagagaatatttattaaagaaaaatggtgtaattttaataagaatagttttgtgatattttaatttgtataatttttattttgttttttcgggttttgtagtagatttgagaattaataagttgtaattatggtgaaaattagtagtttggagggagtagaatagagttggggtttttttaaaattttgtgattagagaattgttattattttatttgtttggtggttttttggaatatttaatttgtaaagtagtttttatttgatttgattgggaatttgttcggtgtaaaaatttttttttatgaaaatatttattggaaataattaaaggtaatcgaattgtttgaggtagtggataatagttgaggaaaataagagattaaataaaaagtttaaagggaaaatttgggaaatgagatgtttaaggggttttgattatttttattatatttttggaaatttagaaggttatgtatatatgtaggatggggtgtatatttaggaaagatttgagaagattgtaagttttttttttggattggttttggtgttttgtataaggaggaaataaagggtaaagtggagttgttaattgtttggttgagtgttgaaggtattattaatatgtatatagaatttgttgtggtttgaatatggtttgtttttattaaaatttattttgaggtttggtttttaatttggtggtgttgggagatggtgtttttaagaggtgtttaggttattaagttggattggtgttttttttgaaagattgggttagttatgaagtttttttgagagtgggttgttataaagtgagtttgttttttttgttttgttttgtttatatatatttcgttttttttttgtttttttgttatgttttgatatagtataaggattttagtagaagttattaaattagttgtttaatattgaattttttagtttgtagaattatgagtaaaataaattttttttttttataaattattttattttaggtatttttttataggaatataaaataaagaaaaagttttttaggaaagattaggagatatgtttattttaggtattttaggaaatttttgtttaaatattaggtgattattaagttaattgagaaaaaatgtaatagttatatataataaagaattagattttgtaagatttgtttagaaaagttataaaataaaataataataaataatgaaagtaaattttagaagggaaagcgagggaagaattttattatttgggttgttatattatattatataaaatatttagtttttaataaaaattataagatatgtaaagaaataataaagtatggtttgtatataggggggaaattaataaataaaaaatgtttttaaggaagtttagtatttagatttattagataaagatattaaataagtatttaaaatatatttaaagaatggaaggaaattatgtttattaaaggtaagtatatgaatgatgttttattatttaatagagattatagtaataggaattatataagaaaagaattaaatagaaattttggagttgaaaaatataataatagaaatgaaaattttattagattggtttgatagtagatttgagtaaggtagaagaaataattaataaagttaaatgtaggttaattttgattatttagtttgaggaagaagaagaaaaatgggaaaagaaaaatgaatagatttttagagatttgtagaatattattaagtagattaaaatatgtataattgtagttttaaaatgaaaaaaagggtgttagaaaaaatatttgaagaaataatggttgaaaattttgtaaatttgataaaaaatgttaatttatatatttgagaattttaatgaattataagtagaataaatttaaagagatttatatttatatatattgtaattaatttgttgaaagttgaagataaagatattttgaaattattaagagagaaatgatttattatatttaagtaagaagattgatagatgattttttattagaagttatggagggttaggtgcggtgatttatgtttttaattttagtattttgggaggttgaggtgggaggattgtttgagtgtaggagtttaatattttatttttatttaaaagaaaaaagtaaaaatataaaaaagagagatagaggaagataaaaagaaagagagagagagagaaagaaagaaaggaagagaaagaaagagaattatggaggttagaatgtaattgaaagatttatttaaagtgttgaggggaaaagttgttagttaaaaattttaaatgaaggagaaattaagatatttttaggtaaaaagaaatagagattttattattagtaagatagttgtattaaaatatttttaggttgaagtgaaaggatattagaatatagtgtaatatagttaaatttatgtaaggaaataaagatattaaaaaggtaattgaaataggtgaatataaaagataatataaatgtattttttaatgatttttttttttatttaatttaaaattttagtaaataatatttataaatttgtgttgataggtatatatgtaagaatggtataatttgtatgataataatagtacgggggtagggaatagagttgtatagaaataaagtgtttgtatattattgaaattaagttggtattaatataaattagattattaatatgttaattttaatttgtagggtagttattaagataaaaaagtagaggaattaaaaatgtagagtaaaagaaatgataagtgaattaaaatgatatatagaaaatgtttatttaatataataaaaagtagtaatagaggaatagaggaataaaaaagatataagaaaaatagaaaataaataatgaaatggtagatataaaaatatgttatagtaattatattaaatataaatatattatattttaatttagataggttagtagaatggataaaataaaaatgatgtaattatatattttttgttggagataaattttagatataaagttataaagaggttgaaagtataaggtaggaaaagatatattatgtaaagagtaattaaaagaaagttggagtggttatattaatgttagataaaatagattttaatataaatatattattagagaaaagtaaggatattttaatgataaaagagaaagttatagttgtaaatatttatattaaaaaagaagaaaaattgtaaattagtaataattttttattttaagaaattagaaaagaggtcgggtgcggtggtttattttgtaattttagtattttgggaggttaaggagggtggattgtttgaagttaggagtttgagattagtttggttaatatgatgtaattttatttttattaaatatataaaaattagtttggcgtggtggtaggtatttataattttagttattcgggaggttgagataggagaatcgtttgaattcgggatggggaggttgtagtgtgtggagattaggtttttgtattttagtttgggtgatagagtaagattttattttaaaaaaataattttgttttaaataaataaataaataaataaaaaaagaaaagaaaagaaaagaaattagaaatgagtaagataaattagaattagtgaaaggaatgttagaatgggaataaatgaattaggaaatagaaaaagatagagaaaattaataaaattaagtttttgtttttaaagaattaaaattgaggaaattttagttagattgagtaagaaaaaaaagaaaggaattgaattatttaaattaggaataaaagatgagatttttttattattttatagaaatgaaaaataatataagggaatattgtgtataattgcgtgttaataattagataatttagataaaatggatatattttgtgttgggtagggtggtatatatttgtagtattagttattagggaagttgaggtaggaggattgtttgaatttaggagtatggggttatcgtgtattgtagtttgggtaatatagtaatttgttaaaaaaaaaaaagataaatttttcgaaaaatataattattaaaataatgaaaaagaatataatattttaaagtattttattttttataatgttttttgataaaaatagaatagagttagagattaattatagaaagataattaaaaaattttgaagagtttagaaattaagaaatataaattaaaataatttatagattaaagaagataattagagattaaatttaattattattagatttttgataataaaaaattgaaaatattagttgggtgtggtggtttatgtttgtaattttagtattttgggaggttaaggtaagaggattgtttgagtttaggaagtttaaaattagtttggattatatgatgagattttatttttacgaaaaataaaatataagttagttggtgtggtgttgtatgtttgaggttttagttttttaggaggttgaggtgggaggattatttgagtttaggagtttaaggttgtagtgagatatgatagtattattgtattttagttagggtaatagagtgagattttgttttgaaagaaaagaaaaggaaaggaaagaaaaagaaaagaaggaaggaagaaagaaaattgaaaatattgtaaattatatttgtattataaaatattataatataagatgaagttgaagttaggtttagataaaaattatatgtaattttaagtgtatataattaattggaaagaaagaaatattgaaaattaattatatatttagaaaaagaatgttaaatttaatttaagaaaagtaaaagtaagggaattatatatataaaagaagaaaataatttgataggaaataataatatagtagaaaaatattaataatattaaaggtttgtttttttgaaaagattaataggattgataaaattttagtaagattgtggaagattttaaaataagatagaaggtatgaaattttaatattaggaatgaaaaaggtattgttattatgggttttgtagatattaaaattataatagaaaatattataaataattttatgttgataaatttgaaaagttagatgaaatagatatattttagaaaatattatttattaaaatgaatttaagaaataatagaaaaatttttataattttgtatttattaaagaaattgagttggtaattataaaattttttataaagaaatttgtaggtaaagatgattttattgggtgaatttttttaaatatttagtgaaggtatttgttaattttatataagcgattttaaaagacgggggaataaaggaatattttttaatttatgtagtaatatgttaaatttttataagtatgaagtaaaaataaaaataaaaaagtaaaagtaaggtttattttatttttaaatatagatataaaatttttaaaagatttattagttaattaaatataatattaggtaaaataatgattaagttgagtttattttatgaatatagggtaagtttaatatatgaaaattaagtaatgaaaatagtaatttatggttgaaaaatttgttagttattattaaaattaagtagttaaaattagtattatagggtaagtttaatatacgaaaattaagtaatgaaaatagtaattttatggttgaaaaaatttgttagttattattaaaattaagtagttaaaattagtattattgataatagaataaattaatattatgtgttttttgatttaatgtacggagatataatattaattatgaagaatttttgtttttgttatattttttatgagttgtttagtttttttttaataaatgttttttttgtttaattatttaagtttgtattttattgtttaaaattaagaatttgtattagtatagtagtaatagttattgagtattaatgtttatagtagtgttttaatatagatattatttatttttattttaagatgagataataggtagttatagttaagaatatgattttaaattatatatataataataggtgaaggaaagaataaattttaagtttatttgtttttaaattttatttttttagattttttaattttttttttttgattatgtttggtatttttgattaagtgattttagttaggaatttggtttatttaaatatatagaattattaatttgtttttttttatatttttttttgggatttaaggatgttagaagttaaggagagaagataaatatgtgtttttattgtgatgttttttggggaaaagttatgtggggtttagataaaaattattgttttttagagaataaagatatgttatttttagggggttgtttatgagatttttttataaggttttaaatagtaagattagatgtagggttagttttcgagtgatggaaaagaatcgggataatttttttttgggggtatttttttttttttgtttttttttcgattttaaatagtattataagagaattttaagttttgtattatttattttaggaattttaaagggaaggtgaaagaaatttggggagaaaaaaaattttttttgaatgtatgaaaaaataggtgttggggtgatgttgatgttgagatagttaagtgtaggtatttgattgttatttggggatgggagtaggagggagtgttggagatcgtggatttagaggttattagtgtagacgtgtagggagttataggtttggatgagttttttagagtagtaggtgtagagtgataagaagagggttgacgattaatattaggtgtgtagttttaggagtgaagaagaagagtatttaatagaggggataggtttttatttttgttttggtatttggagtaataggaagtgtttgattgtttgtgttatttgaatatttttttttttcgatagtttttacggtttttttgtagattgtttttttgtttatttttattttagattgttttttggatttgaggttttagttattatgatatgtttaggtttttgaatagggttgtgaggagggggatggagggaaaatattaggggaaaggatttatttgaatgtatgtagagattttaaagaagttttttttttgggaaattttggtaatatttttttttatttaataaaaagtgggtgaaaggtagtgttattagtttttggtagattaagtttttgagaaggttttgttgtacggatgtgtgtaattgaagttgtgtggagggagtttgtgatttatatagaagtagtaagggtaagaggaataagagaggtttaaaggtattaagtgtagaggtagtgggtggggagatttaggtatggaagttagtgttttattgtgaatatttggaaagtttttggttggttttaaatagtagaatatggttggattttagagtttgttgttagaataatgagaattaatacggaagtttatttttagatttattattagttatgagatgatggagggttaaggaaattatagtaagaggaagagattttaaggttagttttttaggattttattttatttttaaatttttagatgggagagagaggagtgttatgtatttttgtattatttttttttggagttgagagagatagaaaggagaggggaggggagggaaggggaggaagagatgaagagggagaggggaggggagggaaggggaggaagagatgaagagggagagatggagagggagagatggagaaggagagagggggagggagggaggggagggagaggaggagagagagaagagaaagggagagagagtggggagagagggagaataagtataaattattaattaatttgtggatgtttgattgtttattttttggattattttagatattgaaatttgtgaataatgataagtagggtttggattaggagagtattttaaaagataaggatttgtatataggatgttaaagtttgttaaataggtttttataggtttattttttattgtttttttttgaaataagttttttttgttttttttattttgttattattattgtttttaatattataaagtggaggattgtggaaattttttaagaaaaagaaaagaagtttattgtttatattagaaattttttgtaatttttatttttttatttttttatgttgtttgattgttttttttattattttataatagttggattgtattaacgtttggttttttttaaattttttattttggtgtttaaaggatagatttttgttttagagtagatatgaatgttataaggggagtgtttgatagataaaggattttatgttatttttgtagttgaaattagtttttgtataaggaattaaaagattatgagaagaaagtaatgatggagatattattttttttattgttatggattaatggtattatttggggattaggttaatggttgttttgaaggaatattttataaagtagatattattagtgatgaatttgagtgtgagttgaaatggaagtatagtaaagtggtaagattttttgatgaattaatgtttggtgtaaggaaagaggaagagagaggtaagataatatgaaaatttgatggttgatagaggtggagagttaatattatagtttagggatgagtatgatgtattattgaattttttttgttggtttgtgatagtatttgtggttggagaaatgagaagtgaaagaaaaatttacgtttagaggtattatatttgttaaaaataatagaagagaaaattatgttagatagttttagagaagataaaaagttattatatgattttagggtattaggaagtttttgtttttttagttatttttattttatagttgtgttttaaatttatttattagagttgggcgtggtggtttacgtttgtaattttagtattttgggaggttaaggtaggcggattacgaggttaggagatcgagattacggtgaaatttcgtttttattaaaaatataaaaaattagtcgggcgcggtggcgggcgtttatagttttagttattcgagaggttgaggtaggaaaatggcgtgaatttaggaggcggagtttgtagtgtgtcgagatcgggttattgtattttagtttgggcgatagagcgagattttgttttaaaaaaaaaaaaaaaaaaaaaaaaaaaaaaaaaatatatatatatatatatatatatatatataatttattagaaagttgttttgggcgaatggaatttgtttattgttataattttttaaaatataatattttttgtttagatttaagatatatatatttgagttttatgtaaatacgggatattatgggtatagtaaatgaacgattatatggaagagttataggagttaagatgaaatatgaattattaaaaattgaggataattgaaggacgtaagttttatagggggggttttattttgaattttgttattaagtgtttaataaaatcgagttaagtaagtgagtaaatgaatgaatgataaatgaatgaataagtatggattttgtttttaaagatagaaaggatttataaaagtagagattatgaggtatgaaaaaggtttttttttaagaatagatttttaaatatttttagatttttgttgttttttgagtattttaatgttaattgtttattttagaagtaaatttttaagtatatggttaaatgattttttattagggtgttaagagtatataatggggaaaggttaattttttcgataaattgcgttgggaaaattggatatttatatggaaaataatgaagttggatttttatttgatattatatgtaaatataaaaattaatttaaaatggataaaagatttaaatgtaagagttaaaagtattaaatttttagaagttttattaaatatagaagaaaattttatgatattaaattttgtaataatttattggatatgattaaaaataggtaataaaaaatatataaatttaattttattaaatttaaatatttttgtatattaatgaaaataattaatagagtgaaaaataatatgaaataagatatttgtaaattatttttttagtaagaagttaatatttagaatatataaggagtttttataatttaatagtagtaataatgataaatagtttataaatatttttagtaaaatattagtaaaatgaatgtaatagtatattaaaagggttttttattatgattatgtgggttttattttaaggatgtaagatgttttaatatatttaaatttaaaaatgtgatatattattttaatagaatgaagaatattaattatattaatattttaatagattttgaaaaagtatttgataaaatttaatattttttcgtgatttaaaaaaaaatttttaataaataaggaatgtattttaatataatgaaggttatatatgataaatttatagttaatattatttttaatggtgaaaagttgaaattttttttttttaagattaggaataagataaggaggtttattttaattatttttatttaatatagtattgaagttttagttagtaattaggtaagagtaagaaataaaaattatttaaattggaaaggaaaaatgtaaattgttattgtttgtagatgatatgattatataaatagaaaattataataattttatttaaaaattatgaagtaataaagaaatttagttgtaatagaatatagattgtattgaaaaaaaaataaaggaattttgtaaagttgtaggatataaaaattaatatataaaaattagtagtattatattaataaagaattatttgaaaatgaaattaataaaataattttatttataatagttaaaaataagtaaataagtaaaatatatatttaataaaggaggtgaaagatttatacgtttaaaattataaaatattgatgaaggaaattgaagaagttataaataaatggaaagatattttgtgtttatagattataagaattaatattgttaaaatgtttgtattatttaaagtgatttgtagatttgatgtaatttttattaaaatttttttatattttttatagaaatagaaaaaaaaatttttaaatttatatggaattataaaagattttgaatagttaaagtaattgtgagtaaaaagaataaaattggaggtattatattatttgattttaaaatatattaatatattataaagttatagtaattaaaataatatggtattgatataaaaatagatgtattgataaaatagtttagaaataaatttatatatttatggttaattgatttttaataaaggtgttaagaattaataatgggtaaagtatagtttttttaataaatggtattgggataattgaatatttatatgtagaagaatgaaattagattgttattttatattatatgtaaaaattaatttagaataaaggtttatatataagatttgaaattgtaaaattattagaagaaaatatagaagaaaagttttatgatattagtttgggtaataattttttgatataattttaaaagtataggtaataaaagtaaaaatagataaatgggattatattaaattaaaaattttgttttttttatagttaaagaaataattaatagagtgaagagataatatatggaatgggataaaatatttgtaaattatatgtttgataaggggtataggaatttaaataatttaatagtaagaaaatagtttgattttaaaatgagtaaaggatttgaaaagatattttttaaaagttgatatataaatggttaataggtatatgaaaaaaatgttcgatatagttaattagagaaatgaaaattaaaattatagtgagatattattttataattgttagaatgattattgttaaaggtaggtaataagtgttggtaagggtgtggagaaaagggaatttttgtatattgttggtgggaatgtaaattatatagttattatggaaaatagtatggaggttttttaaaaaattaaaaatagaattattatgtgatttagtaattttatttttgagtatatatttaaaggaaatgaaattagtattttatagagatatttatgttttatgtttattgtaatattgtttataatagttaagatatggaaataatttaagtgtgtattaatagataaatggataatgaaaatgtggtatatatatataatggtatattattgagttttaaaaaagagtaagattttgttatttataataaaaatggatgaatttgaagaatattatgttaagtggatatgttatagaaagataaatattatataattttatttatatgtgaatttaaaaaagttgaattaataaaaatagtgaatagaatggtggttattaggagttgaaaatgttgttggttggaaagatgtttgttttaggttataaaattttagttaaataggaggaatacgtttaagaggtttagtgtataatgtggtgaatataattaataataatgtattgtatttttgtaaattgttaagagagtaggttttaagtgtttttattatagaagtatataatgtatatattaattaggttaatttaattattttataatgtatatatattttaaatattacgttgtatatgataggtatatatgatttttttttgttaattaaaaaagtaaataatttggtttaaaaatgggtaaaggatttgaatagataattttttaaataatatatataaatagttaataagtgtatgaaaatatgtgtaatattattaattattcgagaaatatgaattaaaattataatgagatagatattttatagttattaaggtggttattataaaattaatttaataaaaaaaataataagtgttagcgaggatgttaagaattggaattttggtgtattgttggtaggaatggaaatggtgtagttattatggaaaatagtatgagattttttaaaaagtttataaataaaattattatatgatttagtaattttatgtttagatatatatttaaaggaaataaaattagtatttaataaagatatttttgtttttatgtatattgtagtattatttataatagataatgggtgtaaataatcgaaaagtttattgatagataaatgaataaagaaaatgtggtgtgtgtatatatatatatgtatatgtagtggaatattatttagttttaaaaaaagaagaaatttttttatatggtataatatggatgaatattatggtaagtggaataagttagttataaaaagataaatattgtatgattatatttataagagatatttaaagttaaaataatagaaatagagtgggggtttttaggagttgggaagagcgggaaatagggagttgttttttgaggataaagttttattttgtatataaaaaagttttagagttgttatataataatgtgaatattatttatttaattgagttatatatataaaagggttaagaggataaattagatatggatgagatttaaggtatgatttattgtgaggtaaattgttttttagttgtgaaatcgaatatgttatttgtttttaaaatataatgatgggataggtataggatagaaatttttattttaaaaggaagaaatgggagagaagaaaagtgtattaggttttgagtaagttaagtttttagaataatttttttgaattaaggttttgttttttaggtatattggggaggtggtttttgttttatggttttgtgtagttttgtttttatagttgttttttttggtggttttatttttgaggtagttgggtgttcgaggtttttttaggttgaaattgtatattagtggtttaattggtttagggttttaggggtggttttattttattgttttattgggtattgcgtagtgtaatttttttatggtggttttgtatatggtggttttttgtttacgtattgtggttttttagagtattttttgaaatttaggtggaggttattatgttcgtatagttttttagagtatagtatttattaaattaggatttgttggagttatatttggggtagtttaggagttttgtgatggaatgtggagagtagagttttaaggtggtttatgatagtgagtgttgaagttttataagtatttgtagttttttttttgaaattattttgttttttatgtttttgtatttcgtatttcggataggagtggtagttttgatttgaaatgtttttgggttatttttttattgttttgatgaatagtatttagattttattgagatggttgatttatattaatttttttattcgatggttatatagatatattattggtgttttgttttgaatatgattttttagtttttataatatggataggttaagaatttttttaatttttaagttttgtttttttttgaattaaaattttatttggtgttattttttgattttagcggtaggggttgataaatttgaatttagagggtgaattagaggaggtggggggtatttttttttttgttttggtgaggagttgtagtaagtttttcgcgttttttttttttgatttatcggttatcgtagtttatgtgatttagggaagttggggtgtttttttatttcgtatttgggtggtttggacgcggggtttttttagttttttagggttttagcgttatttgtgtaggtttatttgtagtgggttacgtgtgtatatcgggtagggggattatattagtatttagtttttagtggaaatttattgagtaaggaagagttaaaggtaagtgagaaagggtgattagttagttagggttattataataagatattataggttgggtggtttaaatttaaatttatttttttagagtttggaagtttaagattaagttgttagtaaggtaggttttattttgaggtttttttcgttggtttggagatgattgtttttttattgtgtttttatagggtttttgtgtatttgtttttttggtgtttttttttttttttataaggatattagtttttataaggggttttagggttttatttggataatttcgttttattttaattatttatttaaaggttttgtttttaaagtatttatattaggtgttaaggttttaatataggaatttcgagttgtggggagggataaaatttagtttttaatagaggtatagtttttggaataattaaatttgtaaataatagtaatggtattttagggtaggagtatgattttaagttatggttttttaatttggtattattgttatttagggttgaataattttttgtgttgggggttgttttacgtattttaagatgtttagtaatatttaatatttttgggttatatttattagatattaatagtgttttttttttttagtgtgagaataaaaatgtttatagatattggtaaatattttttgtgaggtaaaattatttttggtggatattgttgtaagtatagggttttttttttttattagggataaagtgtagaaggatagattttttttatagaagttttataagtttaaataggttataaatatttttgagtttttttagtagttttttaagtttttgttatttttgtgtgtgtgtgagtagattatatatatatatgtatatgttttgagaatttatatattttatttttgggattaataggtttttataggtttgttagttttggtatgagagagtttgtttttttatttatgttaaatttattatttttaaagtttaaaagattttttttgttgtgtattttaggatttggtgaataagattaatgtagtttgattttttttaagattatagatttgtattatatatgttgtttatagtggatattttttattttttttatagtgattattttattttttaaattgttttcgttgtttttaaagttttgttatttttttatgttttttttaaaatttaggattagtggtggaaggtattgtaggagtagtgggtatatttttaggggttgagtttggatggatagggttaggaaggaggatggatttggaaggttatattagaggtattagatgatgtgatagatgaaaaggtatattaaaaagtaatacgtacgttataaatgtaattttttttgtgataattattgtatcgaattgggtatttttgagtttattttgttgttttttaaagtagttggttaaggttgtttttattttttttttaatttttttgttatttttagatcgaatttatttgttatattagtgttaggttaataattttagaatataattatgattattttattttttttttaaaaattattattgtttttttattgtttgtaaagttttatattttgagtttggtattgtagttgtttatagtttttttttagtttgatttttttttgtgtttttataaatacgttgtgttttagaaagattggattttgatatgatatataaaaaatgtttttatatttttttttttatattttttaaattatttatggtgttagtatgattttttttttaattttagagttttttattttgaggtagaaaataagaggtttagaattaattagtattagttttttgtttttatttttttatggtattaagttaagttagattggtaaagtttttatagttggttttagtttgattttttgtttaaatttatttattaaattttttggaaatgagggtagttttatttcgggttggttttatgaagatattttagttttattaaatttttttttggttttgagattaatttacgttggtcgtgtatatagtttttttttagaattcgtgtgtgtttattttttgaagttttattatgtttttggattattattatattattgatgttgtttttgttttaaaggatattttggattttgtttgtttttgttatcgtttgtttgggtagtagtttgtttaattttaagttttaaagtttttttttttttttttgattaagttttttagatttgtatagtttggtggtaataatgttttttatttagttgttaagataggagtgattttttggtgtggtttttgagattttttagggattttatagtttggatggttttttgggagtttgtttggttttatattgagttgtaaattatgagaggaaagttatttagtttttttaattaaagagattgtttttaagttttttatagagttttttttttttcgtgtttgagggttttttttgggttatgtgttttttgtagaagattagtagtgaattgttatgggattgataatagagttttttgggtttagtggttagttttgtttttttttttggtttttttttgattatttataaatatatgattttttagtttagttagggagattgttttttggaatgagagttatataaataaaaaagattaagaatttagtaatggagttaatttttattaagaatagaggtaatttatttttttatgaaattttttagagagtaggagatgtaattttttgagaaaggaaggaaatagttttagggaggggttgttgttttttgggttattttgtatgagacgggaaagtgaaagtagaatcgacgtaattttatggaaggttatttttgttgtaagtatttatttttttatagagaatattttgtatgttttcgtgtgttaatgggtagtgtgaattaagagtgtttatttgtgtttggtagaatattttttaagaagggtttggtagtcgggtaagttatatagttggagatattgtttgagtggaagtagattagttttttttagttgtttgtttttattaagtaagaattatatataggtaaaaagtaattttaaaaattgatttttggttttgagaaaagttaaacgtgtaaaatatttgtgattgtataataaagttgtatgtttaagaatataaatattttataatagattagttattatataaaaatattgaaatattttttaattttttattttgattagatgaagagagttaaagaaggaaagtgagtgtatagaaatggaaaaagaagtggattaatgtagagaaagaagagatatttagaagaataaaattgtggttttgaggagagaggaggtggaatggttagattttgttttttattaatagaagattaggttgttgtatttaaaaggtttgagaagaagaaaagatgtgatagttattaagtatttagtagatgttaaggattgttttttgttatgttaggtataattagatgattaagaattgaagttatataaatgaatgtttgattaaggagatattgttagttggggatagatttttagaggtattttgtatttagagatttttagaggagtagaagttttagaatgaatgatttgaatggtgttaggaaaattagaggagtgtgatgttttgaaatttgaataaggagagattttaagaaagtggaatgatttattgtgatgaaagtagtagaaaattttataaagataaagatttggtgattttggtaattaatttttgttttattgaggttatggataaggaagttagattgtagtggggttgagaatgagtgggaggggagaaagaggaaatatagaagtgtaatattttttttaaggaatatgggaagagtaaagaagaaagatgagggtggaagttagggagatgagaagagtattagggataaggaagatttgagtttaaattttaaattgaagggaaggatttggtagtagggggttgattagagttaatagagagatagaagggaggatagttgagataagtttttagtggaggtaggagtgaaggtttcgagcgtataattggaggttagggttagtttggagtaggaagagttttagtttttgagattttaggaagaagaagaaagagaaattagggtttttaaatggttagaatgtcgttgatgaagggtgtgtttgattaatttttttgatgaagtaagagttaaggaatttttgttgttatgtagaattgaatgtggagtgagaggagagtgagaaggtttggaatttttataaggagattcgggtaattaattaattgattagttaattaattaaatggtttgttgttttttttttttttttattaatttaagttaattttgtttttatcgggttttaaggtaaaaattgtgtttgtttgttattaattatagataaggtataattttattatttagtaggatatttgcggtttttataatttgatattagtttgttttttaagtttcgtttttttcggtttttcgtttatttggttatgtagtagttttttgtttattatatattttgaggtttttgtgtttttgtttaggttattttttttttttgtaaggtttttattttttttttcgtattagtagatttgtatttattttttaaggtatagtttaaatgttattttttttttagttttttttatttagggtagaattaagaatttttttttgtgtattacgtaataatttatttattgttgttatagtaaatatgggaaattgttattttaaatatatagtgttagaagttgtttttatattttggagatgtaattaattttaaggaggaaattgatttttgatttagaaaaatacgttaatgcgttattttattataaatgaaatatttaaagtttgtatagatagaagttatatgtttttgtgaagtatatggagatatatgttattataaaaatattaatttattagaggttttaatgttttttttttgtatttttttagatgtgattttatgtttatttatttaggggaaaatttggatttttattatagaagattaaaagtaaataatattttaaaatagaatattgatagttatattaaagttatagttttaaaaattagatattggtaagagaaaagggagtttttaaatttataaaagtttaggtttttagagttttttgttggggatttattttagattgagattattttttttgggaggtgggtatttattggttatttttgtgtttttgagattttagaaatattagaattttttttttttaattttttgttatttttatatggtattagagtttataggatttattttggatttatagtttggatttatttatatatattttagagttttacgggattttttagggatatttttggtttgataaagagatattgtttgtggatatttttttttgttattttaattgtattttttgtttttgtgaggatatttgggaagatgaaaaatattttgttattattgttattttttttttgtattattaatatttgataaatcgaatattatttataagttattatgaaaataaaaggaaaggtaaattaattaatatttttagaagtttttaaaagttgtaaaaattattaaatttaatataaaaggataaaattttaaagttaagtttttggtaaattgataaaattggggaattgatgatttgatgtattaatttttgattagttgatgggttgattttagtgagttgacgtgtagtaaattggtgtttaggatggttatggagaggtttgaattggtttggagttaggggttatagtttagaatatacgggtttaggattaggttgtagtttcgttaaattggaaggatgtgagtagtagtagagttacgttggggttattagtaggtaaggtggttgagttttattgttttcgttagggataatcgatcgtagattagattagttacggaaatgttggcgagcgatggggataggttaaggaattgggggtagagaattattagaaaagagaaaaaatgttatttagatttagttttttatagttagtacgttttgtaagtttattttttgttttaggatgttatttttaaaagggggagggagagggggaagagaagaaatcgtgaaagattgtgttttttttagaagatatttgaagttttttaaaaatattttttttaaataggaagggttgtatttatgtttttcgatggttaattttggggtttttttattattatttggaattgttgttttagagtgtaatgagattagttatatatttttaaagttattttttttgatgtataaattttaaattatttgtagatataaaggaagagtgattttagtttagaattttttaggagatagaggttggaattttggtatttagagaagttaggagacgggaggggaaagttttaagggaagtgagtagtttttagttaaagggtagaagtttagagtttgaaaagtgatggttagtaagaaatttgttgtgttggggagttgtttttaaatgattataatagtttgtttagggtaggaggttggtgtaggagatgttattaattttatacgtaagtatatatttgtattatttttttgtttaggaattattagatattttggtgatagtagtgagttatttgaatttttgtaattagataggtatttgaaattgtttaattattagggaaaggattgttttagaaagttgtaggttatatgaatatttatattgtatattaatagatttttttttttttttattacgtatttagttttgtgtatagatttttaagatagttatttttgttggtaggaattataattgtggttttaaagtttagtacggtatttaaagtaaaatagattaaaatagagcgatgtattagtaaatagttagatttaaggtttagaatggaaaaatttaatggtaaggtcgttttttggtggaatatttaggtagtaataggaaaggatttgaagattttggtaagttggttatttaaatgtaaaaattttagaaaaggagttagtggttaattggtagttaattaagagtatttagagtagcgttgtttagtagaaatataatgggagttttttaatttaattttaaattttttagtagttatatttaaaaaggaataagaaataggtgagattaatttaatatatattttaaatcgtaaatatataaaaaattgtaaattgaatattaattaatatagaaattattgagattatgtatatatatttaattaagtttttaaattttagggtattttatatttagagttttttttggtttaatagttataggtggtttgtggttattgtataggatagtatagtttttgaggaaggggattatgttttgtttttttgtgtttttagagtagtatatagtgtttaagttatattaggtgttttataaatatgtatttaatgaagaatattttttaatatttatttgaatttgttatgttttaaagaatatgatagatataattttattttaaagttagtattttagataatttagaataattggatttgtgttatttttaaaggatattttagtaagtttttgtcgaatttgtgtttgttttattattagattttagttttaataatagtatttttttttagagttagggttatttattttatttatttttatttgttattattgatttatttatttaataacgtgttagcgtttagggggaaaaggaagattgtgtaataaagatttaattatttatgatttttttttataggttttttttatttaggagggaatgtggattatatatatatattttaagaaaataaataatgaggaagttttggtgagattgaaaggtgttttgaattgggttgtttgttggttgtggttatgagaaggtttttggaattttttgtttttgttttttcggtgttggttttgagtaattattgtttgttttttgttgtaaaaaacgatggtaagattttgattgtttgtttagttgttgaggggtgggtgagaaaatttaagttgaaattttgttggagtgggaggagttggggattgttttagttattgttttttttgttattttagttattagtgttttttacgttttttagtgtttttattttgaagttttgatttgaagtgatatttaaagggtagtgattatggttttgcgttggtttaggattttagttggtttttttttttttttatatatatgatattaatatagatggttattagtgggttaaaataatatttttagggagtgtcgatattttaaaagaaaaatagtaaataggattatttatgtttttgaaagaagtggtagaaaatatagattagtcgtttaaaatgagtattaaaagtgtattttaaaagttagaagttattataatatgaaaaaatagagaatatagggaaaatatttagaagttttaggtgtaaaaaatatatataatagttaaagtaaaagttatattaatgggataaatagtgggagagatgtaattgaaaaataaaatagaaagatggaggattatattgaggagttagtttagaataaaagagggaagaattgagaagttattaatagaaaagttaggggaaaaggaggagagaattatttaaatatagattatatgagttttataaagataaaaaatagaggagaaaaatagttaaagaaataaaaagatgaatttttagaattaaaagatagagaagatttataatgttttatagagagaaggaaaaatttattttagatatattagtaaaatttaaaaatattaaagataatgagaaaattttagaagattttagtatgaaagattgatatgggattttttaattgtgatattggatgtaaaaaaaaaaatttggaatgatgttatttagaatattaaaggggaaaatattttaaatagtatgtaatatatagttaaattttatttaaaagtgttggtataattttaaaaaattattaagtatataagattttagaaggtttgttatgtaaatttttatatttgaaaggttttggaagaagaattttaattagagaacgtattttagaaggtgttaaaagatatgaaaagtaatgttgattaaataatttggtgaaggagaaaatatgtgaataaatttgaaagtatgttaaagtttttatttagttagagggaagatggagaaggtatcggtaatatttaaaaaaaaaaaaggtaatgaagattaaaaaagaaaatttggtcgggtgtgatggtttacgtttgtaattttagtagtttgtgaggtcgagttaggtagattgtttgagtttaggaggataagtttgggtaatacggtgaaatttcgtttttattaaaatataaaaaaaaaaaaaaaaaaatagttaagtatggtggtatgtatttggagttttagttattcgggaagttgaggagaatcgtttgaattcgggaagtagaggttgtagtgagttagtttagattatgttattatattttagtttggtaatagagcgagatttcgttttaaaaataaataaataaataaataaaaaaattttaaaaaatagaaatattgaaataaataaggtattataaataagtttaagtgtattaatatttataataaatataattagaatgtagtaaagatagggttatgtgtttattaaattattatatttttttgtatatataggtaacgtatatttttttattttcgtgcgtttatgtggggttattgtttattttttgttaatggaatgtgagtagagatggtaaatagtttttggtttaaaattatggaaataatgtgttttttttaggtttttttttttatttgtaaagttaggagtttatgaagtgttttttaataatagagatgtaaagtggagtttagttattttgaggtatgttttggaaaagagttatagagtgtttaatttgttttgaattatacgtggttaaaaaataaatttgtgttttgttaaattattgaggttttagtgtttgttttttgtagaaataagtttgtttattttgattattatatgaattgaatataggttagaagatagagatcgttagattgaattagaagtaaaaatttatatttatgatattttaagggttatatttaaagtataagtataaaggaagagtaaaaataaaagagtagaaaaagatatagtgaataaatatttaaagatagttgtagaatttattattattagataagatagagtaggatagaaagatttttaggataaattgggaaaaggtttagtttattaagattgtaataatttttaagagtaaatattttaataatttaaatgtagagagggtaaaagttgatttaaaaattagaaataagttgaaaaatttatagttatagttagagatttaaatatattatttataggttaggaattgtggggtatgtttatagttttagttattttgggaggttgaggtaggaggatcgtttaagtttagttgtttgaggttgtagcgagttatgattattttattgttttttagtttgagtaatagagtaaggttttgtttttaaaaaataaataaataaatgtattatttttagttatgtataggttagtttaaagataaagaaaatcgtaataaattagaatgataaaatttatatgtttgatttaataaatatgtatatgtataaaattttgtattatatttattagagtttatgtgaaatatttatagaagtttattatattttaagttatagaggattattatgtaattaaattataagttaataataaaaaatatattttaaaaaatttatgtatgtttttaaataaaaaaaaatattcgatattcgattgttattaattaaagaagtaatattttttattatgagttttttatggttttttcgttttttattttatggttttagtttttattttatttggggggaggtgaaggtggtaagggttttaattagggtaggattaaagtagtgaagatattgtttatttatgcgtaggtgttttttaggcgtttatgatgtgttaggtattacgtagatattgtggattagaaacgaaaaaattaagattagggttttttataaatcgggttatgtaaattaattattagttgttatttgattaatttgaagttagaagttgtgtttgttttatttaaaataggtattttttatttattgaggaaagagtattggagtaggttttattagtttatagattattcgagaattatttggggagtatgttgaaaatataggttttttggttttgttttggaaaggttaatttaatttattaagtaaagaggaaatttaggaatacgtattataacgaattttttaggtgatttttatttggaattagagattcgtatgattttttagttttttttaagttgaaaattatcgattttatggtttttgatatatggtttaatttggttagatttttttttatatagacgttagttttacgttgttgttgttttgttttgttttgttttttaaatatatatattggattaaatttttttagtgttttttattagtcgagtttaattagaagttaaaggtaagggtgatgtcgttttttagtttgtgttagtttggaggaggtgttcgggttttggagggattaatagagaggattagtatttttgtttttttcggggagtttacgggagttttttatattttgttttagattaaataattttaataattatatatttttttttatataatgaaattaaataataataaaagaaaaataaaataatatttttgaaagtgatttaaagttttaagaggtttttattttattgtgtagttaatgttttttttttaaagattattggtaaagtttattttattttttaatttaaaatttgtttacggaaattttttgggaaagtaggattttttgtatcgtagatggatatagagagaggatttgttggagtttagttgcgcggtgttttgacggttttttttttttttttagggggtttttttttggaggacgtggtaatagttggtttaagttttttttattttttaaaattttttttggttttttttgggggtttagtgaatttttttatttttttatttcggttttttttttttttatttagtaatagatatatttatttagagaatttttgtgattggttgaagatagaaggggtcgtttttattttcgaatttgttttttttttttttattttcgttttgtttttgtttttattatacggattgagattgatttgattaaagtattagagtgtaatggtttttagagtagggttggttttggggttttatattttgatgatttttttgagttcgtaggaggtaggggttattaagggtgagtgcgagggcgaggagggtgcggcggggagtagagatttacggagttgggttatatgaggaggtggtatggaggatgtttgtttttttcgttttttggtttatgggtaattttttttattaagagatatttaattttttttatttttgttatatttattttggatttaaatgaagatgtagttcggttagttgcgtaggtgttttagttagtttttgttgacgtttagatttttttttattttttttttttttttgagatttaaatttttatttaatagatgttagtaagtattttgatttttttattatttttggtttggaatgtgttcgattaagtttagttttgttgtagtatttatgtttatgtcggtagttaattatttatttgtttttgtttttcgggagatatgagttggggtgcgggtttatagatggtttatttttttttttttttatttttttggttttttattgtgttgggtgtatgttagttttttaataattgttgtttaaataattttatagagttttataagaattaaaatttaatttttaatttttagaaaattagataatagttatggaagagttatatttagttataatgttttgagatggaggaattgggatatgaattttgatttttgatttttcgtttagtgttttttgtaatgttttgagttgtttttttttatttttttggtttttgggttattaattttaatttttatttttgttagtcgtggtttgtttttttttatatttatttgtattgtatttttgtgtaaagttttatatttttttgtttttaattatttttttttattttatttttatagttttattagtttataatatagggtttgataatatagttagggtagatgattatagttaagatttaaattttggaattttaagtatgattttaggtagttttttttttttttattttgatatgttagattgtattgtttttgtgtcgattgtagtgtgttgggatgagtttttttttttttgtttttttttttttttttttttttagggttagtttagtgttagaataggattttgtttttatatagaatttaggacggggtttaggtttagggatttaataattatatattgtggatgagatagatatatttttttttttttttttgattttgaattcgttaaatatagttgattatatgggtttttacggattcgttttttattagttttacggcgtttcgggttagtttatttatgaatttgatgaggaatagttgttttttgtggatttgaagaaaagcgaggtcgtgtggcgtttgtttgagtttggtgattttgttcgttttgattcgtagggtgggttggtcggtatcgtcgtaattaaagtttatttggatattttggtggagcgttttaatcgtagtagagttattaacggtatcggttttttttttgtttatttagttaggcgggaaggtttagagaaatttttttttagtttttaggtttttattattttggggcgcgtttttagcgttcgcgtttgttatgttttgttttttttttttttaggaggttttaggtttttttagatttttttggtatttttttttttgaggaatgatattttttattcggattttcgtttagggattagttaaatataggagtttttggcgtttttattttttttttagttttttttttttttgtttttttttttttttgttttagtggatattttagagtattttttgtttatagatggttataaagggggaacgttttttaattttagttttagtaaggttttggggtgagggatgagtttgtggatttagggttcgttttttttagtgtttttacgggtgatcgtgttttttaagtttcgggtggagttgggttagtttaatatttttatttgtatcgtggataatatttttttttttgtgattaatattatttggttacgtaacggttaaattgttattgagggagtggtttagattagtttttatttttagtttgattatttgtttcgtaagttttattatttgtttttcgtgtttttagtcgaggacgtttatgattgttaggtggagtattggggtttggatgcgttattttttaggtattggggtacggagttttttttttatgtatttttttggttttaggttttttttattttagaatttttttatatattatcgattttttttttttttttttagagttttaggtgtttattttattattagatgttatggagattttggtttgtgttttgggtttggttatcggtttggtgggttttttcgtgggtatcgtttttattattatgggtatatatgtgtttagtgtttttaggtgtagaggtttcgggagtttggggggtgggggaggaaagtggatgattttgaataggacgtgggtggagaattagagattttgttgtggggaaagaagttagaaaagaaatgggtagggagaaaagaagtagaggtggggtgagagagtgaggttttgggggaggtgggtatttagagataggattttagtatattgaaattgagtaatttcgatcgtatgttttttgttattttaggtaatgatttttttgagagaaatgatttgtgggagatattttgtagatttttatgggtttgtgatagtttttgcgtgtttagtgttttttaagtgtatttcgttgtgttgattttgagtgggattaatatttgttttacgggtttttttttttttggttttagtatttatggtagggtttgttggatatttattagtttttttttttatttaatataaatatatatttttgttttatttaaagttttggttggtagtattaaatgttttggtggtgtttgtattgtgttttttttaggttttggttagtttttttaggggtgaggtatgtggtgttggggattggtagtcgttttggggtttatataggtgtgttttgttttatttggtttattgtgtgttattttgtgaatgagttattttatatggattttatgaaatttgttttttgagtttaggtttattttgaaagggatgtagattattttgttttttacgatttttttagttaataatagttttgaagggtgttgggataagataggtttatggggattttatttttgtttgggtttattttgtatgaagaggttattggtattttgttatgatgttattttttttttttattttttttagagttttatgtatgataaagagaggtttaaggtttggataaggtggttattttttttagtggagttagttatgttaggtaggaggtggtagagtcggtttgtaaggtatttcgtaagaggggaggtttatttagatatattttaaatatgtggtttagaagattttggtttatttttttgtgaatagaatttaaaatatataaagagataaattattatattatatagtttatgttaagattaaaatgagtaatatagattacggtttttaaattagaatgtatataagaattgtttgggatttttttaaaagtataggtattggtttggtgtagtggtttatttttgtaattttagtattttgggaggttaaggggataggattgtttgaggttaagaggtggaaattattttgggttatatagagagattttatttttataaagaaagatttaaaaattaattaggtatggtggttcgtatttgtatttttagttattggggaggttgaggtcggaggagtgtttgagtttaggagtttaaggttgtagtgagttaagattgcgttattgtattttagtttaggtgatagagtgagattttgtttttaaataaataaataaataaaatataaaaataatagttattatttagatttattgaattagaatttcgggagtgtagggggtagtaataggggggttgttttttttgagaaggggttttattttgttattaggttggagtgttatggtatgattttagtttattgtaatttttattttttgagtttaagttatttttttgttttagttttttgagtagttgggattataggtgtgcgttattatatttagttaatttttgtattttaagtagagacggggttttattatgttggttaggatggtttttattttttgatttcgtgatttatttatttttttttttaaagtattggaattataggtattagttattgtgtttagtcgaggttgttatttttaatcggttttggatgattttgatgtagttattttggattttggttgtggtttggtaattggaatttagtgacgtaattaggtgttatcgggggttatgggaaagggggatttttaaggtttgaggtggattaggaaggttttttgaagaatttgggtttgttagggtattagttaattaaggtataagtaaatagaggtaaaatgagggtttgaattgtgagtagttggttttggaaaagaaagaaattaagagattatggggatttaatgggttttttaagagagaataagttgaaattaatgattagaagattttgatggaagtggaggagaattattttaggtaaattttttgtgtgttagtaatagaaattttttttgtgtgattatatgtaaagtataggatatttgtaatatagttatggggaggagtgtagggtttaagggtagattttagttaggttttttaggaatagaattcggattcgaaaagtttagagaagttagagttgtttttttaatattttcggatttatatggtttgtgttttttagatttttttgtatgttagcggtgttttttttttgtggattgattgttttttttagtgaatatgtttattcgatagtttttgagtttatattattttaatttttataatttatagaggttgtgttttttagttatagttttaaattattggaaaaataaatgattggttaaatttggagtaggtgtttattttagttttgtgtagttagagtaggaattaagattttaatataaatgtggttgttaagtatttagtttcggggcgaggggttaagttttttttagagaaagaggaataagttggtttttagaagatattataagatacgtgtgtatttaataatttttgatttttgttgattttttgtttagacgttaatttgatgtattattggaaaggtgttttttttatttttgttttaaggtttgataaagttattaaaattgtgtttttttgattaaagaaatatgttttttttttattgttgtatatattattttgaagttattggaatttttaggagtaattttagagtttttagatttatgtatttgcgtgtatatttatatttgtttttagttttaaggtacgtagttttttattttaaaaaataagttgtttttttgtatttttgattttttatttttttttagaatagatatttagtagttttttgttttttgtatttaaattttttttttttgtagggttattttataaattataagtatgttattttttttatataataagaatattaaattttttgtttgtttttgatttagttttttttttatttaagtttttggttacgttttttgagagtgtttacgtggattgtttttagattttttttttttatttattttttttcggttttaatttttaattaaattatgttatagtttaaagagttaaatatttttataatatttgttatagaaatattagtttttagttttattttttattatatttttatttttatagaaaataatttttaattgttttaatatgttttgttggtattaattttttatttttaaataatatgtttgtgttgttatatttagattttttagttttaggttttatttttttattttttgttgtggaagagggggatttagattttttttatttttaaagaatattatgtttttttttttatgtttttttttttaatgtgattatattgtaatttttataatatagtaaaagttattgtgtttattatgtttttattaatatgattatgtaatggtaaattatagagtaagttatgtttatttttttttttttagacgatttcgttttttttggagtatatagttgttttgtttttttttgtgtggttgtatttgtatttattattaatgaattataaaattttttatagtataattaaatatattaggtattttgttaattttattattagatataatttttttagaattttttgtttgttttatttttaattttttgtttttgatgatatagcggttattttgagattatttttcgttattttcgttaggatttatttatttttcgagttggattttttgttttttgtatttagttattgtttttttgtggtttgttttattttaatgaggtattttttttttttattttttgagaaatagtgtatatgaggaaaattttttatgtttcgtatgtcggaaaatatatttattttatttttatatttgaataatagtttttacggttataaaatttaagattggaaattatttttattagaatttttaaggtatttttttataattttttagttttttgcgttattgttgataatttaaaagatattgtgttatgaaattttgtacgtaatcgttgttgttttttttttttagaagtttataggatatttgtttttttttttttttttttaaatttttataggtgttttattatttataagatgaagattttttttaaatcgtttttagggtatttttttttttttttttttttttttttttttttttttgaggtagagttttattttgttatttaagttggagtgtagtggtgtaattttagtttattgtaatttttgttttttaggtttaagtaatttttttgttttatttttttgagtagttggaattataggtattttttattatgttcggttaattttattatttttagtagagatcgggttttattatgttggttaggttggtttcgaatttttgattttaggtgtttcgtttgttttggttttttaaagtgttgggattataggtatgagttatcgtatttggtttattttaattatataatagttttttttgaaaatgattaatgtttaagttatagaaaattgttgtcgtatgtttatttttttttgtttttgtataaattattttttgtgttggatttgtttttttttattaattagttaaaattttatttgtttttttagggtttagattaaatgttattttttttgtgaagtatttttaattttagtttttaatatgttggttattttgtttttgtagtgtatattatatttcgttttgtgttagttgattgtgtatgaatttgtttttgttattaattgtttttttaaagtaagagaaggttgtgttttatagttttaatatttagaatataatgggtattgaaatattgtagaattttatttaatttaattttgtttgttttaaatttagtttggttcgattgtttgtagttggttttaataatattggttatcgtttatttaatatatgtaatgtgtttggttttaatgttttttacgtgtagtggatttgaattttggtttaaaagattaataagatagtgtatagagtgtaaaaaatagtaaatgtttttaaataatcgaaaatttgatttaaaatttgttttttaaaaaattttaaatttgatttaaaatttttgttatgaggttggttttaagtttaatttgtttttattggggtttttggttttttatagttgttttaagggtttgcgttttgatatagtgttgaggttttggagaagtttttgttgttttttttagtttagattgtttattttaagtatgtttagggtttaatttgtatgtttttttttaagtggaagttttgttgtttttgtattaggtttggggtaggggaatttttagtgaggagtgatttttagtgtttgggagtaggattgtaaagatgtattatacggttaattttttcgtttttgggaggtttttttatttgttttggttgttgtaaggaagtagggtttttttagatttataggttattgtgttttttttagtttgggagaattttttttttttgtttgttaaaggtatttttttttttttttttggtataatgtttgggatatttggtataatgttaagtgagttttagattttgggaaatttaaagttagaagaggaaaggttttggcggtgatatgtgttattgttttgtgtgataaatttaaatataaataaaggaaaaagaaaagtattattttgttatatatgaattattttattttttttttatgattaatttgtaagttaagtataatgattttattttataaagaaggaagttaggatttaaattatttaatttgtttaaggttaaatagttaggaggtggttggaaggtttgtgtgatgttagagtttatgttttttttattgtattgttttatttagtagcgaatggagattagtttgtgagatatgaggtaggatgaatagggttagatattagtattattaggaaatgtgtaggaggaggtatttttaattttgggaataaattttttttgaggttttagtagtaataggttgtagggaatgaggtgagtttgaagaatgattggggatggaattattgaagagattttttttttttttttggatttagtcgaagtatttttttagtttagatttttttttttgtttagtttaaatttttttttggttaataagattttatatgatttggcgttgtatgtgtttttatttttatttttttttattttttttttttttattaagtaatagttatattattttttttagaattttttttaatattaatgtttttaatttattatttatttataattcgtgtggtattaatttagagaagttttattgattaattttgttaaataaattatttatttttaatttttttttattatgttattttatttatttttatatatagatgttttttaatgaatgatgttttattttttaggtttttttttttttttgattttagaaaagtttttagataagtgatcgtgtacgtagaggagcgattttattttttttttttttttttttgtggtttaggaggttgttatttatgatttgtaatttggttttattttgtggtttgtatttattttatttggagtttttaaatttgagtaagtttaaggttttttaaggtggatttttcggtattttcgtttattggaaacgttttgttgttttttttttagagttttaatatcgtttttgagatttggttaggtttttagttgttttttattttttttttcgggtttttagtatatggatttgttttaggtataagtttttattgtaatgtttgaaatatggtggttatttaataaatgtttaaagttttagttgattaaaataaaatgtagttattttgtttttaaattttttgatgatatgttcgtataaagaaaaataaattaaaatttgtttttttgatattaataagtattgttttgttaatattattattttttataatagtattgattattattattgagtatttttaatgtgttaaatattagtttaattaattgatatttgttaaatttagtatttttatatttattaagaagtatattagatattttttaaattgttgtatgaaatcgaagtgtttaggagagtgttaataatttaattaaaaataaattaatagaagtaatatttttttgttaaaatatattttaatatatgtaaggaaatgttaaatttaaatatgtatttttttgttttttgttttttttgagatagagttttgttttgttgtttaggttggagtgtagtggtgttattttagtttattgtaattttcgtttgttgggtttaagtgatttttttgttttagtttatcgagtagttgggattataggtatttattatcgtatttagttaatttttgtatttttagtagagatagggttttattatattggttaggttggtttcgaatttttgattttgtgattcgttcgttttggttttttaaagtgaagtatgtatttttattatatagtaatttgttttttaaaaatgatatgttattatttgtaataattgaaaattattggaaatatgtttagtaagagtataatagttgaaaaaattatagtatatttgtataatggagtaatgtaaagttgttaaaaagaatgaggagatagaaaaaataagttttaatgtttgatagtagattggggtgattgtagttagtaataatatatatatatatatatatatatatatatatatatatatatatatatatagtatattttaaagtagttagaagagaggatttgagatgttgttaatatatagaaatgataaatgtttaaggtgaaggatattttaaatatttgatttgattattagttttattgtatgtatgtaatagatatttatatgtattttataaataaaatatgtaaaatattatgtattaattaaaggaaaaagtttaacgaaaaggaatgagaaagatttttttgaattaatacggaggaatttttaggttagagtggaaaatttatagtgtaatataatgattaaattatgtattgtttttggggtaagaaagaggaaagatatatatttttttaaaaaggtggattgggttagatgtggtggtttgtgtttataatttttatattttgggaggatgaagtgggaggattatttgaggttaggaatttaatattagtttggttaatatagtaagattttgtttttatataaaataaaaaaattagttaggtatggtggtattttttgtagttttaattatttaggacgttgaagtaagaggattatttgagtttaggagttcgaggttatagtgagttatgatggtgttattgtattttagtttgggtaatagagtgagattatgtttttaaagggggaaaaaagttgtattggaaggataaataagaaattaataaaaatggttatttttaggaaggaagggagaatagaagtgagaagtgaatattgatttttgaaacgtataaataatttataatgttaataaaaaattgataaaaatttttaaaatttaaaataaatagaattgaattatatagaaaaaataagtattttaagtgatattaaaagatattattgtatgtttttggtggaatatatttatttttttttttttttttttattttttgttgttgttgttgtttgttgtttgttgtttttttagatagggttttgttttgttgttagttaaggttggagtgttggagtgcgttggtgtgattatagtttagtgtatttttaaatttttgggtttacgtgatttttttatttcggttttttaagtatagtagttgggattttaggaatatgttattatatttagttaattaaaatatatgttttaaatagaaatggggttttattatgttgttttagttgatttaatagaatatattttaaggataaaaagaattattagaattttgaatattatttagttgttttatggttaagtaatatttgtatttttatttgaaattatattatatataaaataaagtaaattagtgattatgttaatataattaagaattaagatttttaggtcgggggtagtggtttatttttgtaattttaatattttgggaggttaaggcgggcggattataaggttaggtatttaagattagtttggttaatatagtgaaatttcgtttttattgaaaatatataaaaaattagttgggtgtggtggcgggcgtttgttattttaggtattcgggcggttgaggtaggagaattgtttgaatttgggaggtagaggttgaggttagcggagattgtattattgtattttagtttgggtaatagggagagattttattttaaagaaaaaaaaaaaaaaaaaaagaattaagatttttatgtataaaaagtaagtaaaagtagttgaattaaaataataatattagaaaaaatatttgaattagaattgttaattttaattaatgatttattaatatatatgtttttgttttagtaaatgaaagagtttaatagtagttttgtagtaatgagtatttttaatgtatagattgtagtgtgtaaatattattttttatttaaaggaaatagagttttttggagaagtgattagttttaggtttgagttatggaaaatataaagtaagtgtgagtattttattgtttttataaaataaggtattgtttaaagattaatagagttatgttaaaaaaataggttagttagtttgaaggagtttttattggttaaaattggaataatttagatattaaaaagatgattataatataattaaatatattgagtatataaaaatttatgggtttttattaatagtcgaatatagattttaaaaagaaagtaataataatttattgatattattattggatgtgattttttaatttataatataggaaattggtgtttaaagaaaataagtatatattttgatattttataaggaaatgttttattgatgaaaaaaggtttattttttagagtattagtgaataaatgttgggaaaaataatagaattagaaaattagtattttgtaagtttaatgtgattattgatttagggaaggtattatatatgttaaaattattaggagaatagatagtgaggaataagagagttatattatgttaaagtattatggttatagattatttgttattgttaaatgggagaaatatttttatagaggtgatggttgttattatttcgattgagtgattaagtttagttttattaataataggataagatattaagtatatgttttttaataagatgaaatgtaaagtatatagtaatatttatgaagaattattgttaaaaattttttatttaaatttagttaagtttttgttttaaaaagttttagtttataaaaaaaatatattggatagaggaataagttaaatgaaattataaagaattaattatataaatttaaaatgtgagagattttattggttttgtttttttaaaaagatgttgtttaaaaaatgggtggaatagtgggaattaagagatattataattaaatttagtgaatgatttttggtaatatttttgaggaaaaatagatataaaagtattttttagataaatggggaaatttgaatatgaattggtaatcgatgatattagagagttgtttttagttttgtttagtatgattatagtattacggttatgtattaagttatttttatgttaaagtatttagggatgaaatgttagatttttaatttatttcggaatgaatttagaatatatatatagtttaaataaatatagtaaaattttgatagttgttgaatttatatgatgggtatttgttttagtttattttgtgttgttataatagaatattatagattaggtaatttattaaaaaaaaaaaaaaaaaaaaaaaaaaaaaaagaaaagaaagaaatttgttttttatagttttggaggttgggaagtttaatgttaggtgttaatatttggtaagggtttttttgttgtgatgaagaaaaaaggtagaagaaaaaaggaggagagaaaggatgaaggagaggaaaggagttaaatttatttttttattaggaatttatttttgagatgagataattaatttattttagagatgatggtattaagttttttatgagggttttgtttatttttttaagagatgatttaatcgtattttaaaggttttattttttaacgttgttgtattggggattaagtttttaatgttttatatataataattttatgttatgtataaaataaagtaaattagtgattatgtttatgtaatttagaattgagatttttaatgtatgaaaagtaagtaaacgtagttgaattaaaataataatattaaatttgaattagaaaaatattttgaattagaaatgttagttttaattaatgatttattaatatatatgttttagttttagtaaaaggaagagtttagtaattttgggagatatatttaaattatagtagtttttaagtattattttattttttttaagttttttgtaggtttggaaatttttataattaaagaggtgtgtgtgtgtgtgtgtgtgtgtgtgtaatgttttattatatttgaaaatagtaggaaattaaaggagagagtattagatttttgaatttataagttgatgtatgttattaattgaataattttttttttttttttgagatagagtttcgttttgttgtttaggttggagtgtaatggtgcgattttagtttattgtattttttattttttgggtttaggtgatttttttgttttagtttttcgagtagttgggattataggcgtttacgattacgtttaattaatttttgtatttttagtagaggtagggttttattaggttggttaggttggtttcgattttttgattttaggtgatttatttattttagttttttaaagtgttgggattataggtatgagttatcgtttttagtttgttttgtaatattttataatttaaataaataatgtaaatgggttgtttttttgttttaattaaaataaaataaatatgatgtaatgtttttaaatttttgttttattatatggttattaaatatatatataaaatttgattatttttttagtagattttttatttataggtttaaaattaatttattttattttgggagttttataattattttattaatattatattatttgaaaaaaatgatttgtagttaaaagttattgtaatattgtttatagatattttaggaatattaagaataagtttatttagaaaaatgttatataattttgtttttataagatattaaaatgttatataaaaaattataaaatattaaaatgttatataaaattataaaatataaaaatgttatgtaaaaaattattttttttatatttgagattttattgttaattttaattagaaaatagaaaagaggaataaaaaatagtaaaaatgggtcgggcgtagtggtttacgtttgtaattttagtattttgggaggtcgaggcgggcggattacgaggttaggagatcgagattattttggttaatacggtgaaatttcgtttttattaaaaatataaaaaattagtcgggcgtggtggcgggcgtttgtagttttagttattcgggaggttgaggtaggagaatggcgtgaattcgagaggcggagtttgtagtgagttgagatttcgttattgtattttagtttgggcgataaagcgagattttattttaaaaaaaaaaaaaaaaaaaaaagtaaaaatgaagaaggtattaagtttttaaaattttaaaaagtttttatagtttttaaattttttttttatgtagttaacgtaagtttagacgtacgtttatttttatttttagttttttttttattatttattttttataatttagtttttttaggtttttttttttttataaaggttttagtgtttaagttaagtttgaaggtatggttaggatgaatggtaggtatgaatagttattatttagaaattacgtagtttaaagcgaatattaatagtttaatttagtttggttttttttcgtgtagtaaaagttattattggaattttttttatttatatttatggaatgaagtcgttcgttttttatttgtgtttttatattttttaatagttttttagttaagttaaattaattgggtttggtgaaaaaaataaaattttttatagtatgtaggaattttgtgtagaagttgtatttaagaatatagaagaaaatggagatattataattgatattatagaaatataaaagattatttaagaatattataaatatttttacgtatataaattataaaatttagaggaaatgaatgaatttttggaagtatttttttaagtttgaattaggaagaaatagaaattttgaataaatttagaggaaatgaatgaatttttggaagtatataattttttaagtttgaattaggaataaatagaaattttgaataaattagtaataagtattgatattgaattagtaataaaaaatttttaaaaaaaaaaaaaaggtttaggattagatttatagttgaattttattagatgtttaaagaagaattggtattaattttattgaaattattttaaaagattaagaaagagagaattttttttaatttattttgtgaagttagtgttatttgatgttaaagttaggaaagaatataataaaaaggaaaattatagaataatatttttgatgaatatagatgtaaaaatttttaatagaatattaataaattaaatttattagtatattaaaatgataaattattatgattaagtgggttttattatagggaggtaaggatggtttaatatatgtaagttaataaatgtgatttattatataaatagaatttaaaacgaagttatatgattattttaattaatgtataaaaagtatttggtaaaatttagtatttttttataataaaaaattttaataaattaggtatagaagaaataaattttaaaattataaaagttagatatgataaatatatagttaatattatattgaatggatgaaagttgaaagtcggtcgggtatagtggtttacgtttataatgttagtagtttgggaggttaaggtgggtaatttatttgaggttaggagttcgatattagtttggttaataatagtgaaattttatttttattaaaaaaaaaaaaaaaaaaaaaattagttaggtatggtgggattgtatgtttgtagttttagttatttgggaggttgaggtaggagaattgtttgaatttcggatgtaggggttgtagtgagttgaggtcgtattattgtattttagtttgggtgatagagtgagatttcgttttatatatataaaaaaataaaaattgtttaggggaatttgtttagtttttttaagaattggataagataaagatgtttatttttattatttttatttattatagtattggaagttttagttagagaaaatagataagggaaagtatatttaaattggaaaagaggaagttaaattatttttgtttgttaataatataattttatatttagaaaacgttaaagatttttttaaaagatttttagatttgataaatgaatttagtaaagttttaggttataaaattaatatatataaattaataatatagttttatattaataacgattaattagataattaaattaagaatttaattttatttgtaatagttataaaaaaaattgtaaatgtttaggaatatatttaattaaggaggtgaaagatttttttaatgagaattataaaatattgatgaaagaaattatagatgatataaataaatggaaaattatgttatgtttatagattggaagaattaatatgaaaaatgattatattgtttaaagtaatttataggtttaatgtaatttttattaaaatattagtattattttttatagaattagaaaaagtaattttaaaatttttatggaataataataaaaaaaaagtttggatagttaaagtaattttaaataaaaagaataaatttggaggtattatattatttaattttaaattatattataaggttagagtaattaaaatagtatggtatcggtataaaagtatatagtagattaatggaatagaatagagaatttagaaataaaattaaatatttataattaattaatttttaacgaagtagataaaataatatattgaagaaaggatattttatttaatagatagtgttgggaaaattggattgatataggtagaagaacgaaattagggtcgggcgtggtggtttacgtttgtaattttagtattttgggaggtcgaggtgggtggattatgaggtcgggagtttgagattagtttggttaatatagtgaaattttgtttttattaaaaaatataagattttgttaggagtggtggcgtgtatttgtagttttggttatttgggaggttgaggtaggagaattatttgaatttaggaggtggaggttgtagtgagtcgagatcgtattattgtattttagtttgggtgataaataagattttattttaaaaaaaaataaaaataaaaataataaaacgaaattagatttttgttttttaatatatacgaaaattaatttaagatagattaacgatttaaatttaagatttgtgattataaaaattttggaagaaattttggaaaaatttttatgaatattggtttaggtaaagaatttatgaataggattttaaaaataaatttaatagaagtaaaaataaataaataggatttatttaattaaattaaaaagtttttgtatagtagaggaaataattaagagttaaatagataattatagaatgagagaaaatatttgtaaatatttgataaaggattaatatttagaatttagaaggagtttaaataaatgagagaaaaaaaaaaaattaaataataattttattaaaaagtgagtaaacgatattgatagatattttttaaaagaagatatataaatgtttagaaatatatgtaaaaatgtttaatattattattattagggaaatgtaattttttttttttttttttttgagatagagtttcgtttttgttgtttaggttggagcgtagtggtgcgattttggtttattgtagttttcgttttttgggtttaagtggtttttttgttttagtttttcgagtagttgggattataggtatgcgttattatgtttagttaattttgtatttttagtagagatggggtttttttatgttggttaggttggtttcgaatttttattttagttttttaaagtgttgggattataggcgtgagttatcgcgtttagtttggaaatgtaaattaaaattataatgagatattattttattttagttagtattattgatattaaaaagttaaaaagtaatagatgttggtaaggatgtagtgaaaagggatagtttatatattgttggtgggaatgtaaattagtataatttttgtggaaaatattatggagattttttaaagaattaaaagtagatttattatttgatttagtagttttatttttgggtatttatttaaaagaaaagaagttattatattaaaaagatatagaatttataattgtagaggtatggaattaatttaagtgtttataaattgatgagtggataagaaaatgtgatgtgtatatattatgaaatcgtatttatttataaaaaagaatgaaataatatattttttagtaatttggatggaattggattatttttttaagtgaagtaatttaggaatagaaaattaagtattacgtgtttttattgttaaagaaaaaaaattttagacgaatgaaatttaatagagtttaattgagtaaagaataatttgtgaattggggagttttttgagttagagtaggttgagagattttagaatagttaagtggtggaatatttatgaatagaaaaagtaaagtgatgtatagaaaatagatatgaggtatagaaatagtaggattggttaaagtttggtatttgtttatttgaatatagtttgaatagttgattatttttgattggttaaaatttagtgattggtattagagtaggttttagtttgattatatattaagttaggttttagtttattatgtatggagaaatttttaggttgaatttaaaatatgtaaggaagtagttttaggttaaatttaatttaatatttatttgtaagtaggagttaagttatgggtatgtaaagttatatagagtagtataacggatattggagatatagaagtggggagtggggtgtggggtgaaggatgaaaaattatttattgagtataatatatattattgggtaatgggtatattaaaagttcggattttattattatataatttatttatgtaaataaaagttatttgtatttttaaagttatcgaaataaaaataataaaaataaaattttaggttcggtttggtgggttatgtttgtaattttagtattttgggaggtcgagatgggcggatcgtttgaggttaggagtttgagattagtttggttaatatggcgaaaattcgtttttattaaaaatataaaaattagtttagtatggtggtaggtgtttgtaattttagttatttgggaggttgaggtaggagaattgtttgaatttaggaggtggaggttgtagtgagtcgagatcgtgttattgtatttcggtttaggcgatagagtaagattgtgttttaaaataaataaataaataaataaataaataaaataaagttttaaaaagattgaggtgtgtgtgtgattgtgtgtatgtgtgtgtatgtatgtgtgtgtgtgtttatttttagttttattttttagtttaggttggtggagttaataatatttggaagtttttgttaagttttatttttgaattttttgtttgtttatatttagaatataattagaaatgtttggtatgtaaagatataaattttgaaattagttttattttgttttattagttttgtgattttatgtatattaatttagagtttttttttttttaaaataaaaataataatatatgtgtggtaggaacgttatgtggattaaaaaagatgattatgaaaagtgtttattaatatatatttggtagatagtaacggtttagtgagtgttagttttttttttttggtttttttttttttttttagtttttttagatttagaggaaaagaagattttttttgttttgttttttatttgattttgaagtttaggatagatgtttttgatattttttgtagtaatattagttattttttttttaattatagaattgttttttgaggtagttttttaattttaagttgtttttttagttgtttattatttttttttttttttaatttttgttttttgttttattttttggttaaatgattggttaaatagttgcggggttttgtagggtttatttgtaagattaaaggtagtgatagaaggatatgagattattgggaattagtttgaatagtagagatggatttaagaatagtaaattagtgggttgtgttattgtggttggaaataggtttagaatagaatgtagaattttaagaggaagtttaagtatagtgttatagttagttttaatattaggttatagattagatattagggaattgggggttaagtaaggaaagttttttatagaaggtagggtgtgtaatttgaagtttgatatagtaattaaagggtatagagattgggtagtgttagtgtttttttaaattaagaatatagaataatatgttatggtaattatggatttggaagaataagtattattttattttgtattagagagaatgaagttttattttgatagggatgtaggattgtttggtttttgtaattattattttgtaattttttagtttttatttatttggggttatttaagagttaaaagagtataagtaaatttagaaaattttgagaattgttttaaaataattatttttgggtggggtatggtggtttatgtttgtaattttagtatttggggaggtagttgcgggtggatcggattatttgagattagaagttcgagattagattggttaatatggggaaattttatttttattaaatatataaaaattatttgggtgcggtggtgtatatttgtagtttttagttatttgggaggttgaggtacgagaattgtttgaatttgggaggtagaggttgtaatgagttaagattgtgttattgtatttaagtttgggttatagagtaagattttgtttttaaaaatattatttttgagagagaggagaaaatcggtagatgaaattgtaaaatgtttttttttttttttttttttttgtaggaattttgggtgagaaataaaattatgtaggaagataaggtaataattgttttttttggaagaattgttattgtttttataatttgtttttatagagaagttagttttaatatattttttgtaggggtagaagaggggaaagtatttattaattaattagtgttatttttttatagttttagtaattagaatagtaattgattttatgaggtttgatagtggtagttaatagaagaattgttttttttttgtttgttaaatattagtaaaaatgtttatcgttggagaataaatttttttttttttttaattttaaattaaatattagtttgtttgataaaatgagtaatgtttttatttggtaaagagatgaaagaaatattttattatgtagaaatatttacgtattgtataaggatataaaaatatttgaagtttggggttggttggaaagtttggtaaggatgatgagttttttttatttatatgagaggttatttttattttgatttttttagttgaggtgaggttttattgtaagtgataggtttgatgataatttaggaagggaggtttttattggtgtggtggggatagggtagggtatgaagggagaggtgagtgatgggttttgaaataatatagtatagttgaaagatatggattagtgatagagtcgtgtgagagtttaggttgatgaggggtattgagagaagggatagaggaaggtttaatagattttaatggttgaatagggagttgggggagaataaggggaagaaattaggtagttatagaattgttattaaatgtttgtttttttatgtataaaatggtgatgagtatttattttttaggattattatgaagattaaattgtaaaagtgtttataagtgtttggtatatagtaaattttatataagtgtttgttttttatagtaggggttttttaatttttgggttattgaatattattagttcgtggtttggtaggaattggggtgtatagtaggaggtgagtagcgagtaagttttgttttttgttagattagtagcggtattagatttttataggattgtaaattttattgtgaattgagtatgcgagggaaggttgtaaattttttttgagaatttaatgtttggtgatttgaagtagaatagtttgatttggaaattatttttttcgtttttatttatagaaaagttgttttttataaaattagtttttggtgttaaaaaagttggggattgttgatttagagaatttattgcgagggatatgtttggggaaaaaggtagaattttttttaaaaatgtgtgtacgagtttatgggattttgttattaggtattgtattaggtatttggaattttgatttaaggtttgatatgggggtagttttttttatgttgttttcgtgatagtgagtttttacgagattttatggttttataaggggtttttttattttattttggtatttatttttttgttattttgtgaagaggtgtttttcgttatgattgtaagttttttgaggtttttttagttatgtagaattgtgagttaattaaattttttttttttataaattatttagttttaggtatttttttatagttatgtgagaatggattaatataaggtttaaatagagatatagattttatgggtgggaggtgtttttagaggaatgggtaaatttgtttaaaaatattgtgtaaataaaaagaggataaagaaaggtgttataagggataatatattatgggaggtagaggtagagattttaaagaagtagattaagaaatggttgtttgaaaagtatgagagttaggaataagtggtgttaagttaaagaagttaggagatgtagggtgcggtggtttatgtttgtaattttagttatttaggaggttgaggtaagagtattatttgagtttagaaggtcgaagttatagtgagttatgattatattattgtattttagtttgggtgatagaaatttttttttttaaaaataaataaataaattaatataaaataaaatgttagggaagttttatgggatgttttagaggtaaagggagataaggattaaaaaggtttaattttttttttttgtgattttttgggttataaaaatgaaggtttatattttaagagttgaagtttaggaaagtaagaagggaagaattatttaatttcgggggtaggatataaaaatgataatagatttaggaggtaatcgtgggtaatacgtttaataggtggcgttaaatatttttagtggtagtttataagagttttagaatttttgtttttttggtaagttatgttggagggagttttatttaaatttgttagttagttaggtggtatttttttagttaataaaatattaagtttttattattggaaagttttgtgttagggattttgagagttgtatgtttgtaagtgtacgtgtgttttgttgtttttttaatgtgtggagataagaattttttgagaataagttttatttattttaatttttatatagtttttaaatttatttatatttttttatttatattgttgttttttttttttatattattatttttattggttgggattaattgttgtaattgttttttaaattatttatttttaatattttattaattttaatatgattgtttttagtgtaatttttttaaagtatgtttattttttagttttttattggtttatagtattggaagtttagtgtagtagttataaatgtggattttgaagttagatcgtttggttttaaaatttatttttagtgtttattgataatgtggtgatgttgggtaaattgattaatttttttgtgttttatttttttatttgttaaatgtagataagatgtattttataggattatagtgaggattaaatgagtttatagggtaagtttttatttagtatagtgtatgggatatagtaagtgtttaataaatgttagttattagtttttgagatgtaaatttaaagtattttaaagtatttatttttatttttgttgttttagtattatttagttatttttttagttgttgttttttttgttggtaatgtttattattttttgtttttatttatttattttttataaataggaaggaatttatcgttttgagatatttgaatagtttttagtttagattagagaatttttttttttaaatttttgttagatttttgtatattgttttgttagaattatttatttttgttaaaaatcgtgtgattagttgtttaatgttgttttttttttcgattttagaatataaattgagagtaagaagttgtcgttttatttagtgttggagattagttagtgggattttgtgagtatttttagggtgatgatttaggaaaaaatgaaattatggtgataatatattagttttatgttattatttttatattttttttttagttttttattatagttattttttaattgtttaggaaaatttttttttagttttgtattaagttttagagtaatattagttatttttggtttttgttttgggagttttttatgttggttatttatggaagtagggttttttaattaaggtagtttcgagtgaatttaagagtaggattttggggaaggttataggtaggttggaattggggtttatatatgggtgtataataaggatggtttgtgaagattaagttatgtttatattttggatttaattagtataattattatattatgatggttaataattgtattttattcgtgttaagtaaattttatgataagattttgttttatttttattttatattttttggtttggtaacgtttaggtttataggtttaatagtttgttgaaaaggtaattaagggaatttaataaatgtgtgattgagtaaataagatcgatttttatttttttttataatttaataaaaggttttttatggacgtaataaaaggtagtaaatggtagtatgaggggagagggaaaaagtagtagtaatagaatttatgattttaagagttgagaggagtatagggggaaataatgtttataggattttattagttttttgagttgtgttggagattgttattttggaataaagttttttggtaattaagatggaatttaattaaatttttgaaataattataatttttaagtgagataggtttgaaataagtttaaattaaagttaattaagagattagtttaattggtttaaggtaggtttgaagtttttgtgttagttagttttttttttttttaaagtatttagggcggtttgggttttatttatagggaattaagtatttaggggtttttaatgttaggttgaaatttttattttttcgaattatagaaaataaattttaaaagtatatgagtagaaggggttgtagttaaaatattttatattttgttttaaaattaatttaattaaattttttaattttttttgaaatgagatgtaatttttgatatagatatgtatttagtttaaatttatttatttcgatttttagaattttaatttgtattttattatttattgtttaacgcgtttttattaagtatttacgaatttttaatatttgttatttttaaaagggaattagagtttaaagggagtttaagagtttttattggtgtatataagttagtaagaaagtttaaataagggtttgtttttttttaagtgtttggtaaatagtagtaggtggtttataaatttaattttttattattatttttcgagtttttgaaaattgttgtttaagttttagtttagtcggaatttttaaagagggttgagtattattagtaaaatttattgttttttatatttagtttgtggtgttgttttatatttagtttgtggtgttatttatagtaaaataaattatttgttttattatatttttgattttaatttttatgtttttatttaggttttttattatggtatattatattaagtaaatgttttatttttttagtattaaagttttaaattttagaatgtaaatattttaattttttaaattttttatataatttttttttttttttagtaagataagggggtatgtagaaagtatagttttgtgatttaatcgttggaatattttttagtattttattaataaattatttgtaaatttgtgtgtgattatggtagtaaaatttaataatgtttaataatgtagtaggtttaattatttttttttttgagacggagtgtttattatttaggttggagtgtagtggcgcgatttcggtttattgaatttcgtttttcgagtttacgttattttgttgttttagtttttcgagtagttgggattataggtattcgttatttcgtttagttaatttttttttagtagatagggttttattatggtttcgattttttgatttcgtgatttgttcgtttcggttttttaaagtgttgggattataggttaatttttttttaaaaggtaataaatttaatgtataaagtatttatgttcggttattttttattttttttttatattttaagtttgtttaggagaaaatttatatatttagtgttatagggaaaaatttaaagtttattttaaaattttgagtttttggttaaagtatgaatgagttatagtattattttttatttaaataagagtaaattgtagatttaaagattatttttaaggatttaatttataaaagttatatttattttattaaaaatatagtaaaagtttattggtttaaaaattaagataatttaattataggttagttattgtttttttttattgtagtaatattttttttaaaattattaagataatttttatgatgttttttttgaaatattataaaagtaaatattaaggtaatttaaaatttgaataatattttttttatttataagttagaattaataaagatagtttaggggattaaatggggagatgattgaaatttttagggttttaaatggagcggaaggaaaaagggaaaatagagtagaaaaaaaaaaattaacgtaaaaaaagagttttttttttttttttttttatggaggttgaggggattacggttttattttttttttagttttatttagtttaaaataaattagaataaataattttaaaatagggtttttagaagtgaatagggtagttatggttttaggtaattttagattagggttttgtatatttttatttttgttttgttttattttgaatgggggttttgtgtttaagagattattttttaatggggttgggaatttaatgttgttttgtttatgttttttttttagtaaatgtttttgtattttttttttattgtagagttagtttttttagaggggggtaggggggggtgagatgaagaagtgttatagtaaagggggaaggggtaggtggggtagggtggtttaggggttcggttttgcggagtttttttgttttatttggtttgattttttagtttgagtttgaattattggtgtttgaagacgacgacgaggaagaggaggagttggaatttgagttggagttggaagcgttaaggcgtgatattgttatttgttgtgtagaggatgattttgtttttttattcgttgtagaataaattcgaaagttaaagacgtttaagtttgaatttttatttgttaataaaagatagttaagaaggtaggatggagttaatttgtagtggtatgaaagtatatatttattttttttggggggttttttagtagaattgagttgttcgttgatattttgtaatcgtttttttaattttcgttttttttttaaagttagttttttttttgttttttttataggttttttaatggttaatgaaagaaatttattaggatatattaagattgttttaagtattttattatgggtttttaaggtttttaagttttttttttgaacgttagttgttaattaatatattttattattttgggagttgataattttgaatgtaaatagattttattatttttttttaattgtttttagaattatgagatgaattttattttatacgtattgtagggttttcggggttttttacgtaggtaggaaaggatatagcgtttaagttttttaagtgtggatggtttgagtgttttaaaattaattttaattttttttgggtttgaattacgtaaagagggttttttggtttggattatatgtataattcggtttagtttttttttaggtaatttgttgatgtttaggtttagttgtcgttttttatcgtaatttatgggtttgttttttttttttttttttgaattataatttgtaggtagggtaggtggggttgtttttgtggtttttttggggagtttaagggtaaaaagagttgttagtaaaagaagttttattaattttttttagtatgtttttattgttataatttagtgattttattttttgtttagagtggagtttttgtttttttatttaatggttaagtaagaggtgggttattgggatattgtatagtgaaatagagtattttgtttttgattgtaagtaggtaataatatgtttttaaaaagataatgtacgtatatattttaatgaaaaaatattattaaaaatgtgatatataaatatgttggaaaaattgttgaaagatttgttttatatagggttgttataaatttttaattaaaaaaaaaagtagtatttaaaaaaaatttcgtaaagtgaagtataataaaataaggtatatttgtttaggtatattgatatgggtttttttgtttttttaaatattattaaattatattatgggttagttgtagtggtttagatttgtaattttagtattttgggaggttaaggcgggtagattatttgaggttaggagtttaagattagtttgtttaatatggcgaaatttcgtttttattaaaattatataaattagttgcgtattaaaaatataaaaattagttgggcgtggtggcgtatgtttgtaattttggttatttgggaggttgaggtaggagaatcgtttgaattcgagaagtggaggttgtagtaagtcgagattacgttattgtattttagtttggagtttttaaaaaaaaaaaaaaaaaaaaaaaaataaataaaaaaaaatataaaattatattaaaaaattaaaaattattacgttatgaaaaataagtttagatttattgatttagagtaataggtaaattatatggtttagagaataaatttgatcgttacgtgtttttgtaaataaagtttttttggaatatagttatttttatgtttttagtttatggttattttgagtttattgttagagtagttgtgaaatattttgatttttaaagttaggggttttaatttttagattagtattagttcgtggtttgttattgggttacgtaggaggtgaatagtcggtatgtgggtattattgtttgttatattagtagaagtattagatttttatagaagtatgaattttattgtgaagtgcgtatggtatatatttaggttgtatgttttttatgggaatttaatggtttaatgatttgaggtggaatagttttattttaaaaattatttttttaaattttgtttgtggtaaaatttgtgttttacgaaattggtttttggtgttaaaaaggttggggattattgtttaaagtttattgtatttgttaattggttatttagaattatttttgtaaagagagatggtattttttagagagatagaaatagttaaattagtttttgttttttattttaatttatttggtgttattttttttagaaggtttaaagtcggaagggtttaaagtagtattgttatttttattgttatttgtttttttggattttttaggttgaggtgggcggggtgttttaggttttttgttatttttatcggttttagttcggtttcgatgtttttttgtttttcgttttttttttttttttttttttttttttttttttttgggtttggatattggattttgggatagagtagttagttgtttatgtattgttcgaagttaaaggaaaaaaaatatgaagtggaaaaagtaaataaagataaaataataagaagaaaaaatgaggataaagggtatgaattttttatttaataaaaatttttaagagtgataaaatatttgtttttgtagttttgttaagcgatgagttttttttttttttgagtttgagtttttattttttttttttttttcgttttttttattttttttttttttttttttagaggagtttttattgttattttttttattggaggattttgaagacgatttggttaagttagggggtatggtagtagagattggtaaaggttttggttttagtggtttatttggtattttggtataacggaatttaaatatattttagaaagaggtataaatttaaaattatgttgataaatagtgttttatatatttagttattaagtgatatagttttaatttataattgtatagaatagtgagatttttacgttgaggttatgtagtatatatgataaaataattttttatattatttattttttaaattttaatttttttatttatttgtagttttcgtgttattgttataatatcgtgatttgggggattgtatttatagtagttggagaatataagtcgtatattagtagtaaatttttgtgtatttcggtaattacggttttttatttttcgttgtagaaggaggtagtattagaagttgtataggtaggaagatttatttttttttgttaattttagatattataagaagagtttttttttgagagtatagtggggatgattttaaggatttgtgttttggggtttaagtttgaagttaaaggaatttgggtgggttgaagaaatatttatgtttagaaaaagaaattatttttaagtgatagagaggtggtttatgtttgtttttttattttataatttttttaatttaatattgttatattagtatttaattatagatagtattttttttaagataaagaaattttattttattgttttaaattttaagaaatataaatttttaaaatattagattttttgttttattattattttataaaagtaaaatgttaagaattaaagattgttgtgtgtttatataaggagatttattgttttgtatttaggtttttattattgtttgagtattttatttgttttatgtagtgggtattttgatagtgttgaggtttatggggtgtttaatgatgttatggtagttatgtaggttaagtgtagaagtatttattggtttatagaaaggttaagtataggtagtatgttttttagagagtaatttttttaaaatgttattgtaatgttttaattgttttgaaagttttttttttttagagttttggtgttgttgttgagagttaggtaagtttttgcgtgggggtttgatggggcgattattttttttacgtatagggggaagtcgtgttgttttaggtttaagatttttaggagggttagttggagaattaggagttaagatggttgtaggtgtaggggtggtagtatttgtttttcgttttacgttttttttttgtagaaagaaataagatagggaatttgttattttaagtttattttatttaagatttttgtttttttgttgtttagaggaaatttatagattatattttggtaaggggttgggttggaggagttgtagtaatagtaaggagcgggggtttagtagagtgtaaggatttgagaagtggagaggaaatgattgatgggtggggaatgttgaagatagtggtaggtattttaggtggaggagtatatagggttgtgtgtgatatagaagagacggtaggtatttgatgggtattggtaatattgttttggagcgttagaaaaaaggaaaaaagtgtagtttgatttttttttttatttttaagttgtttatttgtaaaatttttattttttttatttgttaatttggttttttttttgtggttgtttttagggatggttattattagtttttgttttttttgtggtattgatgtaattttttgtaggaatattttttttagcgtttgtgttattaggataatattattagtgggttatgagaatatagatagtaataaagaaagttaaaaaatgttaatagaagatagatatatattattttttttagaggtatttaggttttaggttattattatatttttattagttattttgttattaaattttaaagaaaatttttattttaggttattattaatttttatttttttttaattgttttttaaaattcgaaagaagaaaaaatttgagagttgataagaaaatagatttttggtttatttaggtttttggtgatttttaagaaataggattattatttttaagtatgaagtgttttaaataatttttaattagagttttgaagttatattattgtgtttaatagtattatttagagttaggtttttaagatttcgattattttatttggataatatttttagtagtaaaggatttaaattttatgtagataatatatttagtaataatagaaattattgtttttttttatttattaaatgaatatatagaaaaatttattttgttgtaaatgtaatagttggtgaatatggtattaaaattttgtatatattttgaagtagtttaataataattgtttttaagtttttttttaatagtatttatgtttataggttgttttataattttgtgataattttaaataaagaaatgttaggttagaattatagaaaaataaatgtttatagggagattatcgattttcgatttttatatatatatatatatatatatatattttttatgtattaaaggaatagttaaattgcggttttaattaaattgtgggataaaataaataaataaataaaaaagatttttgatatttatagggaggtttttgttgtttttttttaattatttattttttatttattttggaaattttttattttgtgatattatttttggggttggttatttatgggttgtatgagggaaaggaagaagttaagaattttggttatcgtggtttttttttaattcgaggtgggaatttgtaaaatggagttagggtataaaagttaaggaaggatatatggagggtataaggaaagatgttaagatagttatagtaagcggtcggattaattataaaggattaagatatttagaaatttggtagttaattgttttataggggagaaatgggaattttttaggggtcgtagtatttatattaggtagattatttttatttatacgtatttttgtttattttatattttttcggttttaatgtttttatttatcggtagatttagtttgatagtatttataggttgtcggaatggttatgcgaattgatgtttttatagagtttttattattattttgtgtaggtattgtagttggttggtaattcgttttggttttttgggattggatattttcgggggtggtgggttggtaggggtaagttgtaaagtaggtatcgaagttattgtggggtttttaaagtttttatataagagagagggttttcgaatttttttttttggtgttgttgtttttgggtttagttttagtaattttgtatttttttttttagggagtttgtaaagatgggaataaaattagggtaatatcgtttaaatgaggaaaaagtgtatttgtataatagtttgatgaatttaggtgttggttttagtgaggtggttaagtttatgttaagtgttttttaagtagaaataatatttaaataatttgtggagtttttattgttggtttcgttttttttttattaatatttttagtatattatttagattttatttttttaagtttgataggttttatttgtttttttttatattttaaaaaatttttaaattgtttttgataaggtacgatattttagaattatagttttatggggatggggattaagtaaaatgggtggagttaagaaatttaaattttaagttttttttttattaggggtttggtggttgttatggtggttgagcgtcggtaaggaggaaaagaataaattatggttataaaaaattttataaaatgttgataagatatagaataatttatttagatagaagagagagtattattttttataaggtttgggtagtttacgttataatagaatatagattagaaatttagaggaagaattatattaatttaaaaataaatttagataaggaagaatttgttagattttatagttcgtaatttttaggtttttaaaattattcgtattaaattagagtttttttattttaaggaagttaaaaagtcgtataaaatagttaaggttattaagtgatagtttttttttatttatttattatataatacgattttattattagttttttttgtagtattaatttcggatattaaacgttaatagtggtttatttatagtttttttggtgttttttcgattagttttttttattatttaagaattaaaatattatatgggaattttattgtttatatcgtagagttgaattaggaattttagttttatttttttgttttgaattaaatttttaatgttaggaaaaaataatttttgtattaataaatattatatataatttatttatttaaagaaagtaaaagatttaatgatatgttttgggtattaggaatttgtatatacgggagagtgatttttttatttttttttgggaattttcgttgttagttttttaagcgtttcgttattatggtaattttatagggcgttagaggtgttcgtgaattttttttaaaaggttaatagatcgtcgttagatattagatttattaaacgttaaatttgttgtttaattttattttattttatcgttaaattagttttgtttgattcggttaagattgggttacggcggtattaatagcgtataaattgataatttgtatttttttttacgagtagtagtcgagtcgttattatcgttttaaaatcgtcgtttaatttttttcgcgcgatcgagtcgatagttgcgtcgtaatagtagcgcgtcggggtcgtttagtatttttaatacggcgttttatatttttgtgtcgtcgttttgtaatattttttttttatacgcggttcgcggaaacgtatttattgtggggagttacgttttgtagtattttgatcgtaaggaatcggcgttgtttttagtcgcggaaagttcgggtggtttcggttttttttatcgttcggtttagtataattcgttaagttggggggaggtcgttttttttgggtttttaggcgataaattttttgtttggtcggtacgaaagtagtttttttggggtttttcggagagtttcgggtagtttggcgcgttttgtagacggcggatagtaagaaaatggcggcggttttagttgaggcgggtaattaaggagggattgattttttaaaagacggttttcgattttagatatcgtcgttaatatagttcgttgttggtttgtagggattttttttttttgtcgggtttttacggggtcgacgaggtttcgtttcgatttcggatggaggcggatgaatacgaaaagtggtttagggagtcgtcgtttttatttttgaaatttttttgagggcggagtagagggggtggatagatttcgaggattgggcggggttcgaaaaaggggagttttaggggtttttagggggtttgtattgttcgttgggattagttataggtcgggacgaaggttatttttaagcggatggaggtggattgtaatggcggtttcggacgattcgaaggttttgtatcggtaggtagaattttttagttcgttttagaggttgttttattttagtacgaaatggcgtcgtcgagtttcgcgttagttttttatatataggcggggaggaggagtttcgtcgtttatgcgcgttattttgtttgagattttttttatttttttcgcgcgcgcgcgttcgtttacgcgggtgaagaagttgagtcgaaggggaaggaatattttttcgcgggagttttttttattggttagtcgtaacgatgacgttataaattttatttttaaggtgttagttattaggtagaagagtgtcgtagagatttatagggaagtggtaattcgttatatttttaagttaattggttgagttgtggttcgtcgattttagggaaagagggtggttggaagaggtgcggaagttatcgttttagagtttttagtatttttttttcgtttttttttttaataaagtttttttaagtttttatgtatagtttaattggagattgttaagttcgagtaggtcgtgttattcgtagtttttttattggttaaagtagggaaacgggaggggtcgcgtgggcgtagtttgtttgaattcgttaggggtgtggtcgtaagacgtttggcgggtggtggttttcggcggtaaggtagtagtagcgaagaatttgaaacgaggaaaaagacgttattttagaagtcgcggtttgtttttttatggcgaatagttacgggttttagaacggcgatgaggggatttaacgtttttatgttttatagtttaaaatagtgttgttagagttttataatattttatttttttttttaagttaaacgatggaaagacgagtaaaatattatttattattgtttagttttaaagattataaaagttaaaatacgttttttaaatttgtacgtttaagtatttttttaatttttttttatttatatttatagttattaatatatttttgttcgttcgaaaaattttcggtaattttaaaagtgggattaaaatttttaaacgtatttatttattttatataatgtaatatattttattttttttttaaattttatttcggcgttcggtttagagtagaaaaagtaagttttgggagggatgatttaagggaaaaattttttttttttaggcgagttcggatttttttttttatacgttatattatttttaaaggtatattcgtattcgttttttaggggtttttcgttacgggggcgaaagaattttttcgtttttttattagggttcggagttttttttacggagcggttggtttatcggttagcgttagggaggagggcgagcggaggaggcggcggttgcggtttagattagtttttttttttttttttttttttttttttttcggtcgttcgttttcgaggaggggtaggagttattttgggagtttagtttcgttttttttttttaatttatttttaagttttttttttaatttggttatttaaataagggtgtagattttgtgaattaattagagtttagagttaggatttttagagtatttttggggtcgttttcgtttttttataagagagtgaaaggattttttttattcgagaaaatttgggttttggtggggcgttttttttttcgtttttttttttttcgttattagggagaaaataaatttgtgtacgtatttgggaaaaataattaacgtaggtgaataaatatacggtaagattttttttcgttcgggaagggttcgtaagggtttaggtttttgagttgtaattacgttatttttttttttttgtagtagttttttaattttaatttcggttattgcgtttaaaatggtcgttaattttttgttttttgatttttcgagtagggtaaatttcgggagggcgggggaaaatgagcgttaggagagtagagttttttttttttagttagggattaggttttggtttttaaaagtataagcggtttcgtttgggtggttgtagtatggagggtaatgatatagtaattttgtagaggtttttttttttttttttagcggtttaattttttaaatttgtttttttttatcggggttttgtaggttaggatagaggtttattagggggtcggttatggagtaaaaatttaggaggttgagaaaatattaggttttaggaaaagggtagttagatattgttttcgtttattttttgtatttcggaaaattattgtttttcgattttttattttttttttttttatatgagttattagggaggttattgttatttagtaatttgggaaagtaatttttttttttttttcgttttttttttcgtagtatataaggagagaattgtttaggattgggggaggggatgagggaggcgatggaagaggttattttggagaaattcgaaattttgggagttgtgaaattattttaggtttcgagtttttttcgtattttagattatgttgtttagattttttattgttagtatttattttgggtttggtttttgtttttaagtagattttaagtttttagtttgtaagtattttagtttggagtagatacgtgtttagtaaagattttataggggtaaaaggttttataggtcgtgtttacgtgaatgtatataaattcggtaagcgattcgaagcgtaatttttagtttgcggtgtgacgattggagtttttttatcgcggatataaagggcgtatagtaatgttttttttagaggttttggggagaaaggaagttggcgtttgggaataattttagtttataatatgggtggttaatttttaaagtatttatatttacgggtaggggttatagttattattttttagtttatcgttaggttatttttttttcggtcgtcgatggatttttttttatttggttttcggttgttgtatttttaggggacgaatggaatagggggggttatatcgttttttaatttttttgttttttaatgggtacggaggtatgaggttggttatttttttttttttttatggttttttttcgttcgttttttttttacgtttttattggttgtaaaaggtttgaaggataaatttttttatttttaggatttttttttgaattttaagaattttttttcggattttttattattggttaagtatttgattgatattttcgttttataagggtttttttttatttggattttaaagttttttagggggtttttaaagttgttttcggtttggtacggggtatgtaattcggggtgttaatttttttttagaaaacgaagtcgtgttgggggatggggcgtagtttttagttttttttttttcgaacgggttgggggggtggggagagtatcggggtcgcgcgcgtacgttagtagtatttagattggttgatcggggttacgtgttcgttttttttttatttttcgttttttttttagttacgaggattagtttttcgaacgtttttgggggtcgcgttaaggggttaagggggtcgtatggtttaggtttatgtttcgaaatttagagcgttataacgttgttgtttgtttatatttttagttttttatttcgtagttttggattttgttttttttattcgtttttttatacgagtttagtatggttgtcgtagattaggaatatatatagcgtaggcgtaagggtgcgttttgattgggggagggggaaggagggttagaggttgcggggagagtcgtagtgcgtaggcgttcggatcggaatcgtattttcggcggcggggtttggagcgcgcgtatttcgtggggcgggagttcgcgttcgggtgttgattttttgttttagcgtttttttttttattattcgcggtttagcggggtagtttcgggtggttaggtttgtttttttttcggtgggtgtaaggtgcggtttcgttggttttggtttgaatttagcggaagcgtacgttgttgagttgttagcggaggaaaatggggtttggatttggagatatgagggtttggagagaggggttttttttttggtgtcgtgtggtgcgattattggagagggagtttttcgttttcgtcgcgtttgtcgcgcggagagataaggtgcggatcgtagatgtggatttcgtatttggttttagttttaggtagttttaaaattttttcgtgtcgtgaatttacgttagatttttttttagtgagatttgtgagtttttggatcgttttattttttacgatatttattagttgataatttttttttttttatttatttcgtagtggatcgtttaaattttttatatttttaaagttatgatttttttttttttaagtttgagtgaattttttttaaaattttggaattggtaatataaaatgttatggtgatttagttgttagttaaaaagtaagtttttaatttgttattagtcgataattttttttttgattatttagagtatggtttagatttttacgttgtagattttaatttttttttatcgatagatggtattttatagaatagaaaggttaatttgtagaattggttttttattttttatttgtaaattgggttaattgtgtattttttttttattttattagaggtttttttttcggtttgaggaaattttttattattgatttggttaattttttttgttattcggaagttgttttttttttttttttttttgatttttttaaattttttttttggttttttcgttgatagaaagataataatttttttaatatcgtgtttttttagagatttatgtttttcggtttttttgtatagttaagatttgaaattgaaattatttttattattttaatttttggttatattttttttttttatttttattttttaagttatttttgttaggttgttattattaaaatttttttggtagatgttattaagaattttttaattggtaaagttaggaagtattttatagtttttattttatttgatttttgaggtattcgatatttgattatgttttttttttgatattttttttatttttgatttttatattatttttatttgtttttttttttatttgtgtaattgtttttttttagttttagtagattttttttttttagtttttttttatgtgttgatatttgttgtgatttttgtttgtttttaattttgtttaatttttttaggtaatttgattttatggtttaaagtttttgaagtttgaatttttagtttagatagttttttaagttaaattttttattaaatatttttattgggataatttttagatattagtatgtttaaaattgatgaaattattatatattttagatttgtttttttttttttgttgttttgagtaatggtggttgtttaattataaagtttgtaatttgggagtttgtttttgattttttttttttatatttttatagatttataattttgttttttaattatttattaatttatttttttgttttaattttattatttgagttatattaatagttttttaaattatttgttagatatatggttatttggatttaaattaatataattttaaatttagtgttttaatatattagttatattttaagtttttaatagttatatgtgattagtggttgttatatgggaaagtatagattattgaatatttgtgttattgtaagaagttgtttttttttttttttgatacggagttttgttttgtggtttaggatggagtgtagtggcgtagttttggtttattgtaatttttgtttttcgggtttaagtaattttgttttagtttttcgagtagttgggattataggcgtttgttattatattcggttagtgtttgtatttttagtagatacggggttttattatgttggttaaattagtttcgaatttttgatttcgtgattcgttcgttttagttttttaaagtgttgggattataggcgtgagttattgcgcgcggttttattataagaagttttgttggatagtgttgttttagatttttttttttgtttttgttataatattgttaggagagagttttttaaaatatagttttggttatagttttttttaaaattttgtgttattttttattggttatgtgataaagtttaaatttttatgtttgttaaaatagtttgtttagttttttagttttatgtttaattatttttttttgggttttatattttagttgtattgaattgttttttagatatattattttgttttatgtttttgtgttttatatatgtgtattttttatatggagtagatttttttttaatttatgtacgtttaaataatatttttgaaaagtttaatgttattgtttaagttgagttaattgtttattttttggtgttttttttttttatgattttattttttatagtgaatggtatttatgtgattatatgtttttttttagtattagattttgattttgagagtagggttattatgtatttttttttttgttttgttttttttttttttttaatatttttaggttttagtatagtatttggttaatattaggtttttataaattgagtaaatatggaggtgaattgatgtgtaagtaagtatgtgatttaggtaagattgaaatgtgtatgttttatggggtgttatgtataggggaataattatagataaaattattgtttttaaatttgagatattagaattatgtgaggaaagatagatatagaatagtataggttattgttatagagagtagtttagtttagtttggttagaatataagttataagaagtagagtaggagaagagaaaatgggaggtaaatttatattagagaatatattatagaaggtttttagtgttgttaagtttggaattagtggggaattattgaaattttttgattaatgatttgattagaattatgttgttagatagaaattttgttttttagtggttggtatcgtttatgttaataaatattaaattaaaatgtcggggttggaaggagatgtgattggtgatataaaatatttattgagtagttaaaatgtgttaggtattgtaatgagtatatgtagtaatttttttaatttttataattttataaagttaatattaatattattatttttagtttttaaatgaaataatagaagtaaaggacgttttagtttgttttttgatgttattatagaatattatagattgggtaatttataaatagtagtttatttggtttagttttagttgtttggaagtttaagagtatggtattggtatttggtgagagttttgtgttgtattattttacggtagaaaggtaaataagtatatgagatggagagagaatagaggttagaatgtattttttgtttgtttgtttgtttgtttgttttgaggcggagtttcgttttgtcgtttagattggagtgtagtagtgtaattttgatttattgtaagttttttttttcgggtttatattatttttttgttttagttttttaagtagttaggattataggtgttcgttattaagtttggttaattttttgtatttttagtagggacggggttttatcgtgttagttaggatggtttttattttttgattttatgatttatttgtttcggttttttaaagtgttgggattataggtgtgagttattgtgttcggttttagaatgtttttttttaaatgggaatttatatttatattagtagtattaatttatttatgagagtagagtttttatgatttaattaatttttaaaggttttattttttaaaattgttaaaatggtaattatttttaataagagttttggaggagagatttaaattatagtaggtaatatttatttaatgttatatttttagtaagtagtagaattgggatttgaatttagttgattttgggtggtatattattttgtttattaggtatagtagggagtttaagatttaagattgaagttagagaaaaaagattaggaaaagtagatttgagagttatttttgaggtgatgtttgaattagttacgaaggtagttgaggtttgtaaaagagggggtataaaaataatttagggtgaaggattgagttttgggttatatttttatataggaagtaagaataggaagtggaattaatggaagattttaaggagaagtagagtaatataatgtgaggaagttagaataggagatggttttaggaaggatgttatgtttattgaatgattgattaaattaggattttttaagttttttatgtgttattagtttttttggtagtttggtgaagtttttggattttgtttgataatatttgtaaatgtataaaataaaatataaattatagttattaaaatatagtggtttttttttaattgtagttttaatttttgtgattttagttatttaaggttaatttggtttgaaaataagtataataagatattttgtgtatgagatagaaggattatatttatataatttttattataatataattgttttattttgttgttaatttttttttgtgtaaatttataaattaaattttattataggtatatttatggataggaataaattgtataattatatttggtgttgtgtgggggatattattatatttaaagaaacgtgtgatgatttagtagtatgtgtttttgtattaatataatatagtgtttttttattaatatattaaaaagtatgattttttggtaagtttaatagtttttataattgtaagtgatattttaagatgtttgtaataattataatgtgatatgaaaatattaattgatggtgttttttattgatgatagtgttatagttgttggttggtattataaagatttattttttatatttataaaattagattttagtgagagttttttgaaaataaagttgatttttttttattttatttaagtttatggatttttgaattgtttttttttattttttattgatatataataattgtatatatttatggggtatatatgatattttgatatatgtatacgatgtgtaatgattaaattaggataattaggatatttattattttaaatatttattatttttttttgttgggagtattttaaatttattagttattttggaatatatagtaaattaatgttaattgtagttatttagttgtgttattaaatattatagaatttatttttttaatttaattatatttttgtaattattaatgaatttttttttattttttttttatttttttttttttttagtttttggtaattattattttattttttatttttataagattaatttttttagtttttatttatgagaacgtgatatttttttttttgtgtttgatttattttattaatataatgatttttagttttatttatgttgttggaaatgataggattttatttttttttatggttgattagtatttattgtatatatatatattatattttttttatttagttatttgatagatatttagattgattttatgttttggttattgtgggtagtgttgaaataaatatgggtatgtatatatttttttgatatattgatttttttttttttggatatatatttagtagtgggattgttgaattatttagtagatttatttttagttgtttgaggaatttttatgttgttttttatagtggttatgttaatttatatttttattattagtatatgagtatttttttttttttgtatttttattagtattttttatttgtgtttttttgataatagttattttaattagatttagatgatattttattgtggttttgatttgtatatttttgatggttagtaacgttgagaatttttttatatgtttgttggttatttgtatgttttttgagaaatgtttatttagattatttgtttatttttaaatgggattatttggaggatttttgttgttgagtttgagttttttatatattttggttattaattttttattagatggatagtttgtatatatttttttttattttgaaggttgtttttttattttgttgattgttttttttgttgtggtagaagttttttagtttgatgtaattttatttgtgtatttttgtttttattgtttttttttttgaagttttaaattaaaaaatgtttgtttaaagttttgagtatttttttagtatttttttatagtaatttttatagttttaggttttatatttaagtttttaatttattttgatttaatttttgtatttgatgagagatgggggtgtagttgtatttttttgtatattgttatttagtgtttttagtattatttaatgaagagtgtgttttttttttattgaatattttggtatttttgttgaaaattagttggttgttaagatgtggatttattatttttgggttttttattcggttttattggtttgtgtatttgtttttatgttagtatcgtgtttttttagttattgtagttttgtagtatattttgaagttgggtggtatgatgtttatagttttgttttttttgtttagaattattttgattatttgtgttttttgtggttttatattaattttaggtttgttttttttgtttttgtaaggaatatttttgtattttgataggaattgtaataaatttgtagattgtttttggtagtatagttatttttacgatacgaattttttcgaagatataggatgtttttttatttttttgtgatttttttagtttttttttttagtgttttatagttttttttgtagagattttttatttttttggtttattttaggtattttattttgtttttttggtggggggaggggttgtagttattgtaaatgggattattttttttgatttttttttttattagtttattgtttgtatttagaagtattattaatttttatatgataattttgtattttgtaattgtattgaatttattaattttaagagattttgtgtgtgtgtgtgtgtggattttttagtttataaatttgtatgtttttttgtttaatgtttttttatttttattagattttaagtgtgatgatggtaggtatttgatatagagtatattgttagatatagaaggtggttaataaatatttgttaaataaatgaatttttttgagttttagtttttttgtttatataatggggataataaattataattttgtagagtagttgtaaggattgttgtattatagtaatgttattaaaagggaggatgaatatgggtatggagaaatgtattgaggtagaaataagagtaaatgtgggagttggatggttaggtttgttttttgaaataggaggtggtagggagtaggaagaaaatggtagttggtaaggagtttgggaagggtttagaatggaattggaagggtagtagagtatatagggaaggttgtggaggtgtaaaatggtttatagagattgggtgtggttgtttatgtttgtaattaaagtatttagggaggtcgagttaggtggattacgaggttaggagattaagattattttggttaatatagtgaaattttatttttattaaaaatataaaaaaaaaaaaaaaaaattagtcgggtatggtggtacgtgttcgtagttttagatattttagaggttgaggtaggagaattatttgaatttgggaggtggaggttgtagtgagcggatatcgtattattgtattttagttttggtaatagagtgaaattttattttaaaaaaaaaaaaaaaagaatggtttatagataaatttgataagatttatttttgaaatatttgttagaagggataatttattattatttaatatttgaaggtttttttatttttagtttagtatttttagagattggtagtttatttgtttatcgagtgaaaggttatttagtgggttttttggtggagatatatatatatatagtatatttttttttaaggattttgtagtagagatgaggtgattatgaaatagatatataaatggaagagaataatataattaaaatagtgataatggttaatatagggtgttttggaaacgtattgaagaggttattaattttaattttgggtttaaggaaggttttttgagaggagtgagattttatttgaaaagatatatagaagtaggtaagtagattttaggttattatgggttatgataaggaaagtagattattaataattatggaaggtttttatgtagaagtataatatgattaattaagtataataaaaatatttttttggtagtattgtggaaaataataagattggagagagagagattaattataaagaaagttgtaataattagtgaaaattaattattgaaggtttggattagtaggaatggaaggaaaagaaaggaagatttaagagttattagaaaggtagaattgttaggataattgaatgggaaggtttgaggaagatggggttattaacgatgatttatatttgtagttcgggtggatattttgttatttattgaagttttaaatataagagaggagttggaatatattgggaagggaaagtgatgagtgtatttttgtaattttgagatggagatatatttagagtaataattgttaattttatttgtttatggaatatttaattagaatttattattgaattattaatagtttatgaaatataaaatagaaaatttattaatttttttaaattaatggtacggtttgaaaattataagatattgttttttatttaaaattttatttttttatatatttttgagataattaggagaaatgaatagattgggttaaatgaagttaagtaatttttaattttgttggttgtggtgatggtattatagttatgttaagggaaaggttattatttattatagatatgtttaaaagtatttattggtgaaatgtaatgatagaatttgtttaaaatattttaaaaaatgtagaataatagatgaaataagaatggaagaatgttaaatgttgaaaattgttgatatttatgagagtatattggagtttattagattttttttttttgtgtgtgtttggagttttttaaagtaaaattaaaaaaatttttttagttagagatttaaaggaaattcgtggaatatataattttaaattaataaattaatattgaattatatgataaatgtaatttgaatatgtgataagataagtgatcgattagagattattaagtagatgatatatgttatttgagtagttaggaaatgttgtttgagtattaatatatagatttaattttatgtttatgttttagatgattttatataattgtttgagatgttatatgttgaaaatagttgtattgaggtggttattttttatatgatttttttttttttaggaatagttttaatttatagaggtaatattgtatttggttataattaatgaatttagtggtatatatttaatataagttgagttagtgagagaggtttttttagtaaagtaaaatttgaaagataaagaggtaggaggtttttgtaggtgagtatattaatggtaatttaatttttgtttttaaggtttttgtggttattttatttgaggttagtttatttaattattatttttattttatgagttagattagtatttttttaataaatttttatttttaaaatgtaagttagttagaattggtttttattgtttgtaataaatagatttattaaatataataaattgttatataataaaaaatattatataaatgtgtttgatgttgtattatgtttatgtggaaataaatttaaaaataaatgattgttattattaaatttattttttttattttttgaggaacgttattgtgaagaatatagtttaagaatatgtaaatttatgaagcgttttatatttaaaaaaaaaataaaaataaaaaattgttattgtatagtatttaagtggatttgattagaagtggtttagatatgggtagtgtggaatttagagtaagatttgagttgaagaggtaagtttggaagatattagtaaatgggtggtaatagaaggtatgtgggagtaaatgagaggattatttagggtaagtgtatagtttaagaagagtaaaggttgaggataaaattttagggaatattaatatttaaagggttgttgaaagaaaggagttttaaagggattgaaaaggggacgttagaaaagtaggagggaaaattaggagagagtgttattagggatgttagaaatttgattaatttaggagatagggtatggttaatagtgttagatgttgtagagattagtttatttgatttggtaatataaaagtattggtgaataattgtattgttgagagttaaaagattaaatggtaagaatgggagcggggttatagttgtttatgatttttttaagaaatttgattttgttaggggaaaaaaaatagagttttttttatatatttatttatttattttttgagatggagttttgttttgttatttaggttggagtgtaatggtacgattttagtttattgtaatttttatttttcgaatttaagtgatttttttgttttagttttttgagtagtttggattataggtattcgttattacgtttggttaatttttttttttttttgtatttttagtagagatgggattttattattaattaggatggttttgattttttgatttcgtgatttatttttttcggttttttaaagtgttgggattataggcgtgaattattgcgtttggttaaatagagtttatttttaaatgttagaaagggatggtagagttgagtgttagaaagttagagttttttggatttatcggtgttgtgttattatttttagaggtatttatagttaatgataaagtagatagtgaattattgtaaagtagaattggttgttttgtttattttttgtttataattattattttttaaattgatgagagattatttttgagatatttatgatggaggtagttgggaggttttggtggggaaggattatatggagggaagagtagttataagtgtttgaatttgttattatttaaattgagattatagaaggggagaatggagttaattattttttattatagttttggtgagggatggttatgtttgtttttattttggttttgtttatattgtgttttttatggagaatttggatttttttgttttgttttttttatttagagaaattgtagtgtttgttgtatttatttttatgtttttttatttagtttagttttttttgtttttttttagatttttttttaaatagattggtgtaattggtataaagtgtttgttaattgattgttaatttaataataaggggattgaggtttttttttgaagggtgggtttaatttggggttttcgtattaattttgattacgtgtagagtattatttagtatattatgggttgtgagtataattttgtttattatttgtttttaaatggtttaaaagttaagaatggtttttatatttttaaatggttagggaaaaaaaaagtaaatgaagaatatttcgtgatatatgaaaattatatgaaatttgaattttagtgtttataaataaaaagagggttgaggataaaaattttagggaatattagtatttaaagagtagttgaaaggaaggagtttatgaaggagattgagaaggagatgtttaagaagtgggaggaaaagttaggaggaaattaggaatatagttatttttttttatttatatattgtgtatggaggttttcgtgttatagttgagtatttatgatagagatttgatagtttataatgtttaaaatatttgttatttggttttttatagaaaaagtttgttaatttttggtttaggattttaggtggttgtgttttatatgtttttttattggtagttttataaattttttttttattgtttaggggtttgaatttttttattgttagaatcgttgatgggttagtgtataaatgttgggatattgggaaatgtttttttgttttttggagggttattatgatttttaaattttagtttttttttggtattttgtttttattatatagatatatatatatatatatatattgttgttttagaatatttaggaggttatagagttgtttttgtttttggttattattgttgttattatttgtttattaaaagaggatatgaagttaggtatagtggtatgtgtttatagtttttagttattgaggcgggaggatcgtttgaattcgggggtttaagattggagtgagttatgattgtatttgtaagtagttattgtattttagtttgggtaataggggaaattttgttttaaaaaaaaaaaaaaaaaaggtggaaggtatgaattttgaaagttttagaaatattgttggataatatttatatatattaattttttagattatttgattgttatattagagtttttttattgtttttttttttattttttttgttttttttttttttttgtttaataaatttgaagtatgtatattgatagttttttttttattttttatttattttttagtttattataatttggagttgatttttattataatattgaaattgtttttaataaatttgttagttattttataattattaaatttaaggatattttttaatttttttttgatttttgagtagtatttaaaaatgttgattttgtttttttttatggtatattttttttttatttttttgatttgtttttattttggtttttttttagtgttttggatggttttcgtgttattagatttttataaattagggtattttagtgtattcgttattatttttgttttagtgatatatatatttttttttattgtgttttgaattgtttagtttaggagttagttaggtgtgtattttttagtttttttggatatttggttttttttttgattttgttagtaggaggtattgatgggagattagaaggtaagagaaattgagaagtattttgttttagtttttaaatagtggcggtggttggtaatagttggtagttattggttgtagttgtagtagtaggaagaatgggagatttaggattttagttttttgagtagaagtatttttttaaggattttagttttgaaggaggtggtatttttttagtagattggaattgattatgatagtgttttttataaggtaatgagtagatttatagattttagtttagggatgatggtagtttttgatttttagatagtaatttttttttaaaatgtatatttttaggatttttttttttttttttttttgtattttttgtttttttaatatttttgtaattaattttttatattaaatttttttagtttgaagtatataaagtagttaaatgtttttgattggattttggataattggtatgaggtttggggtttgagtttatgtatgtttttgtttttgttttattttttattttttttgtatagtttatttgggtgattttatttatggtttttgtttcgatatttgtgttgatgatttttaaattagggtttttagattatatttggggtttatatttatacgttttattgcgtttttatgtagttttagttggttgttttattggtattttaaatttaatatgtataaaattaggttttttttttttgtaaatttgtttttatggtatttttttttgttttaatttagtttatttttgattatttatttagttatttatgttggaaatttgagatatttttgatttttttatttttttatttttatagttaattagtagttaaattttttagattttattttttaattattttgatattttattttttttgttttttttaattatgatttaatttaggtttttattatttgttatttaaattattgttgtattgttataggagtggtgtgtatatgtgtaattgtttattttggtatgttatagatttttgtttagtagttttgttttaattttttaaaagttttagtttattgtttgaaatattaattagaatattttttttaaaatgttaaaatgattgttattttttagttttaatatttttattatttgttaagtaaaagtaagtttttttttgtggcgtagtagggtttacgtgatttggtttttgttcgaatttgtagtttattataatatttttttattttttattattttttattatataggaatatttaagcgatttttataatatttatattaattagtatatagggtttttaaagaggatttttggatgtttgtgatttttgtatttttgtttattttttgttttggcgtgtttttttttttttttatgttttgttggttaaattgttttttttttaagttttaggagtttgtttgattatgttttttttatttcgtatttttataaaattattgcgatttttaaaatatttggtatatttttatttgaatatattatattgttgtgtaattattttttggtttttttttttagtattagattttaagttttttgaaggtagattatgtttatttatttttgtatttttagttttgggtttaatatttagaattttttgtatttttaatatatgtttgttaaatgaattagagttaatgtttgaaggagaataagtttttttgagaaagaggaagagttaggagggaggagaaggtagggttcgaagagttttgggggtttatttggggaagatgcggttttttattgtagtattttgttaggaggtggtattgttttgaagagttagttggtcgtttatagattgaggttgatagtttgaaattaaagagggaattttattaggaagtaatatttttttattgggttttttagtttagttatatgttatattttgttttggttaaatagttaagtttttaggaggttattggttttaggcgtttttttagtgattgatgatgttaaattttacgtttttttgattggtttagataaaatgataagggtatttattggaaatgatttggtaaaatatgatttaaggttattttttcggggagggagttggggaagttgggttggttgggttggtagtttttatttattgtgtggtaagaaggtatgggttatgaatagaattaaggagttgcgttgttatagatgttattatttttgtggttgttattttatttttgggtcgtttttgaaggtaagatggtatttttatttatttttattttgaatttagggagtttatttagttttgtgaggaaaagcgttgtgttttgtgagtggtgggaagttttatgaggtagtggaaataataggggagtggggaaagatagttgttatgtgtggttggtaaacgatattagtgatgttttgtatgttttatttaagataattttttgaagcggagattgttttttttattttataaatgaagaaaatgagatttagagttatttgtgtaagtttatattattggaaagtggtagagttgggatttgaataaagtgaatgttatttttatttttttatttaagattttattttgttttttattattaatttattttgtgatttttgaaaagtgttttagtttttttttttgtagaggatggggtagaatggaagaataatttggaagatttttttttttttaaatgtttgtttttttgggtattgggttaaaggttttttgttggttgagcgatttttgttaagagttttaaagaagagggattattttatgtagttatggggttattttttttattgttgtttttgggaggtttggtaggttaaggaatagaagatattttgagagacgtttggtgttaatgaagtggttgaagaaatgtttggatataggttttttaatttattatttgtgtttggggatagtgggaggtagttttatttatggtttggggaggttgtagttatttttttttttttttttttaagagtgagaaatttatttatggttttttttagttaatatagtggtttggtatgaattagataaaggaattttttttgggaggatatagttttatgttaggatgtatggtatggtgagtagaatgtaggtttttatttgtttttttggttaggtgtttttgtgtagtttttaaatatataatgaatagtgattttgaatttgttattttattttatatatatatatttttaaattttttatttgatttaatttattttttttgatacggtatttcgttttgttatttaggttagagtgtagtgacgtgatttcggttttttgtaatttttgtttttggggtttaagagatttttttgttttagttttttaagtagttgggattataggcgtatgttattatatttagttgatttttgtatttttagtagagatggggttttattatgtttgttaggttggttttaaatttttgattttaggtgatttattcgttttggttttttaaagtgttgggattataagtttgagttatcgcgttcggtttttatatatatattttttgagacgggtttattttgttatttgggttggagtttagtggtataattatggtttattgtagttttaattttttaggtataagtaatttttttgttttagtttttagagtagttgagattataggtgtttgttattatatttggttaagtttttgtattttttgtagagacggtttcgttgtgttgtttaggttggttttgaatttttgggtttaagtaatttgtttgttttagttttttaaagtgttgggattataggtatgagttattatgtttggtttgaatttgttattttagaaagtagaattttttatttttgttaattggtttttttataggtaggggaagtttggagagatgttataatttgttttttattttttttgggagggggagtttaaataatagatataggaaagggttttattttagtttacgttttttaagtaggttttgtttgtttttgttgttttgttttgagatagagttttattttgttatttaggttggagtgtagtggtttaattttagttttcggtaatttttgtttttttggtttaagtaattttttttttttagtttttcgagtagttataggcgtatgttaatatgtttagttatttttttgtatttttagtagagatggagttttattatgttggttaggttggttttaaatttttgattttatgatttatttattttggttttttaaagtgttgggattataggtatgagttattgcgtttagttttattttgttgttttttaagttggaggagaaggtttttatttttttgaattttattttgtgttttttgtagtttttattttaatgtggttagatgatttgtaaaattatatatttttgtatatagtgtattgttaggatgggagttttagtgtgggattttttgaggtttacgacgaggattagtttttttttttcgattttttttagaatattcgggtgtttcgtttgttcgaatttgttgattgggtttaggaatagggagatgtttttgttattttatttgataaagagttttgcgagtggatgatttagtaaatagggttaaaatttgatgggaaaatttcggtgtttagaggttaggagttttttggggagtgaagggaggagggttgtattaattttattgatttgtatattgaataattttttttgatattagttttttattttaaatattttttggttttttttattattttaatttttttattagttttggtttgtattttgtgtttttttggtgggtcgaagtatttagtatgtagtaggtatttagaattatgtattgaatgtgatgaatttaataggtattaattgatatttattgaatattaatatttgtgttattatgtttagtaagatggatgggaagagtggaaatatttgatgacgtgattatgttttagtgagaagatagtgtatggttagatattaatgtgagttttagataggaagtgttgaaggaagttatggtggaggggtttagagtagtttggatttggttttgtttttacgtttagttgtagtttttgtttggaagaagatttttttttagagtttagtttttcgtttatttttgttttttaaagtttgatttattgtgtttttttttgtttttttttttatatgttatggtttttttaaatatagagatattatttaaattagtttttttttttttttatattttaatttttttattagggttttttatcgttgaagtgtttacgttgaagtttttggagtttggtaagtttaatattttggtttgttttgttagtaatttttttttatttatgttgatagtgaattggtagtattatttcgtttttgtggaaggatttgggtttatttttgttttagttgtcgatggatttagtttttaggtttttttttatttaaattttatattagaattttttgatatttttttttgtattgtgatttacgaaattgatcgttatatagtaattgtttattggggtgaggttttttttttggaattttggtttttttgggggtaaaaagggatagatttatgggaggaggtttttttttttattggtattttgtttagtttatttttattttaagtttattttagttttttatgttattttagatatttacgttatttttttgggtgggaggttttttaattaggtttttaggttgagttatttattttttttagtatttcggaacgtattgtttttagatttgttggagaatgtgttgtgtggcgtggtttttggtttgggtgtgttgggtattatcgtgggtattgtttttattatttattttcggaagttttgtttaggtggtatgttatttggagggggcgggtgagtttgtgggagttagatatagtggtgtatgcgtgtatgtgttaggattattttgtggtatggggggatatatagcgatttttaggtttttgggtgtgggggtttgtatttagtattatgggggtatatttttttagttggggatttagttatatatatatagttatgggttataagaattgttttgagtgaaaaaaggaattatggggtgttgtaggaagggtgtttggagatgatttgggaataaggagagattaatttttgtagggtgtggtgtaggtagggcgagtaaggtttttgtgggggaggaggaggaggagaaggaggaggaggatggattttttgatgttttttttttatttttgttttttttttagattgatttttttagattagagtttgatgttagtagtttcggttatttaaatagaggatgtttagattttttatattttgtttaggatttttttttagggtagaagaagtttttgggatatttttggggtgtgtgtgtagattttttatttggggattttgttgtttttgggtttgtattttagggattttagagtggtttgtttattataattatattttttttttttataaggtaataaattttatttttttatattagtgtggttttttttttaatttatggtatttgtttttggatattttaatttgagtgggttgtcgttttaaatttagtatgttttaatttgaatatagtttgatttcgttagggagggaaatagggaaaatttttaatttgttagttgagtttttattttttggttttggcggtatatgatgtttttttatttatcggtttgtgtaaaatatgtgagaaacgaaggtagagttattttttaataatttgtttataaaatggttaaggaagttgtttgtgtgttttgtgcgtgtgtgtgtgtgttgtgtattttattgtttgtgaaaatgtttatgtttcgtataggttgttttgaggaatatataattttttttaatttttatcgtaattgagaaatagaagtttagggatgggaagaataagtttttaagtgttatattaattagttatgttagttttgggaaaatagtattatgaagtttttaatatgaagtgaaaatagtttggaagggtaaagaatttatatgttttttttgataatttgttttttggtttgagtgaattgtttaaggagaattgtataggtgttgttttgggaagataacgaaaggtggtagtatatgattattggtggtaaattgttttgtatatgtttttttttttgtattttttagggtttgggagttgttttggatgatagggtggtaataaagttgagagggtaattatttggtgagggagtttttgtttttggtattgtattagagtttaatttaaaagaaaatattaaattttttttaagagaagttgtattgtttttgaattattttatttttaatagtattatgtgtatcggttaagaagtatgggttttggaatttgattgttggggatttaatcgtaattgttagcgtttagttgtgagtttttgggtaagttatttaatttgtgttttggtgttattttttgtaaaaggatgatgataataatggtgttttttttattattttatatttattatgttgttaatatttgaaagttaaataagtattagcgaggataaaggaaaatgtgaattgtaatattttggtttgttggtgggaatgtaaattgtttatgatgttcgaattatagaaattatgaattagttgagtgaaaaagttaatataggaaataaggtagtatatttttatgttgtgaagtttaaataagttaatatttatagaatgtttaaaatagtgtttggtatatagaaaatgtgttgaataattttaatttttattattattggttttgatttttagaggagaatttagttgtttcgtagattttttttttttttttgaaaatatattttaatattagttttaagtattgtattttttttattttagatgtttttttttttatttttatgttagtaattttagatgtggtgttttttagttttttttaatttttttgtttttttgttttttaatttatttagatattttttgttaggtaagatttaaaagtgttttattatgttgtgtgattttagataagttattttttttttttgggttttaaagtttttatttgtaaaatgatgggtttagattagatgttttttgatgaaattttttatgatattgttatttaagtattttagaagtatttaggtattttttttagtttggtgttttttttttaatatattatattacgtattatttttagtaggaatgttatttttgtttaaattttttttttttatttttttttgaggtattatatttgattttggtttagggtatttgtttaggttttttttttttatacgggagttttttttattttgtttattttgtttttgttttaatttattttataggtttaattttagtttaatttattttatgaatttgtttttaatttttttttattgaaattttttaagatttaaagtatttaatttaaggattgggatatgtcgttttattttttatgttaattttttcgtttaattagtttataatttttataatttagggattataaatagtttatatttttattaataaagtaagatagtttatatttttttttatgtttattaatgtttgtaattatttgatttttaaatgttggtaatatggtgggtgtagagtggtattttgttgttttaatttgttttttttttattattaattagtattatattgtttgattattttggttttttaatatgtgttattattaagaagaataagtttttatttttttattatttttttaaaaaatttattttttttttttttattaaaatattttaaaatatttttggattttatttttttgtatatttataattagttgttaaatttttttgaaatttattgttattttaatttggggtagtatttaggttagagatgtggggagaggttgttattatgttagtatggtttatttatgaatatggtatatttttatattttttaggtttttgtgtattttaataaagttttttttttttttaaaatttttatatttgatatgttaatttataaatatgttatggtttttattgttattataaatagtaggtaatttttagttattttttaattgattattggtaatataggatttaaagtaataaattttgagtttaagtaatggttttattatttagtatttgggtaaatttgggtaattatttaatttttttttgtttttattttttcgtgggtaagatgaagatagtattttttaatagttgtggtggtaaaaaataaaattaaaaaaggaaaaatagttgtggtaaattagatagattatttttagtagtttaaataatttgattgtaggttggaaggatggtgaattgattatagaaattataatttaaaggttagggtttagagtagtgaattttgatagggtaggagggtgtgtgtgtgggcggaggtgaggtaaggggtagatggtaggggtggggtggggattggatagattgggtaagtaatataattttggtaggatgtaggtgtgtgtagttttgaaaagatattgaagttacgaatgtggttttatgttatgaggcgtgattaattggttgagtaattttgtgtttataaaatggagattttagttaaaatcgtttgttttaagaatttgcgaattgatatggagtaattttaggaagtgtttagaagagatttattattatggttatatttttagaaaaaaataagaaattatatttgtgattttttttaacgtgtagtgttagtgacgttattgtagtttgtttttgttttagttaatttaggttttcgtaggatattttttttttgatggtattttatagtattgttaagtttgtggagttatatattagatttataatgttaattgttttttttttttttaatataaatttagtttagtatttaaggtttattttaggttttttcgattgagagtattttttgtttattatgtttatggtgatttttttttttttttttaagattattggttttattgtttatttattttaatataaattatttaaagtgtttgtttttattttttaattgacgtataagtaaagcgatatgggggtagaatttatatttttttattttgtatttttttagtaatgttttgtatataaattttgggattagtttattgtaggtatgtggtggttaggttaagggtagaggtaatgggaaaggagaggatttattttttgggtggttgtgtagaggtaataaaagaaaggtaatatgtgggaatttggttggggttttatattttttcggtttcggtgttatattaataattaataaataagtaataatggatagagtaattgaaatgttattttgaattggttagaggtggaaagatagagttatatttgtaaaaatggaagggttgggaggaggagaggaaggaaaatattgttgagtataggtgtttgggttttttgtttttttttattttaaaaagtttttttagtgtttgaattaatagagaagtgaaatttttttttattattttttgttgtggttttatagaaggttttatattttttttgattgtcggagtagagatttagatataagagggaattatatttagttttattgttattggttagggttatgtttagtgttggtataggattatatagttagtgtttttttgttagggttaggttttgtagatattgaaaaggattttaggatttggtttttataaggttaggttaatagtttatttgggtaggatggggaggaatgtgagggggaaatgtattgggggggtgtgggggaaaatttagttttgaaatttgttaaaagagaaagtggaagggacggtggtttttagagtagaaggaattttgaggataggaaagataagatttgggtgaattgggttatggattgtgattttttttttttttttttttttagcggaggttttattaattttttttatttgagttattttagttttaagatgtagtgagtgtgtgggtatgtttaagagagtgtgtatgtgtgtgtgtgtgtatatacgtgtatgtgtaatagttgtataagaagaggagttatagtttttagattttgggtgtgaatttttggatttgttttttaatttgggaaatgaggataattaataagttttttttttttttttttttttttgagatagttttattttgttatttaggttggagtgtagtggtacgatttcggtttattgtaatttttattttttaggtttaatcgatttttttgttttagtttttagagtagttgggattataggtacgcgttattatatttagttaatttttgtattttttgtagagacggggttttattatgtttgttaggttggttttaaatttttgattttaggtgatatgttttttttagttttttaaagtgttgggattataagcgtgagttattatgttcggttaataagttttttaagatgagatgagatattatagaaaggatttatttagtattgtatttgtagaagttttatagattatgtattttttattttatattttgtttattttaatatatttgatagttcgttagtagagttagagtatataagtaaggtgagtgggggtagtggttgggagttatggtagagttttagttaattttaattagttatataacgaatttttcgtttttggtaataatttttgtatgtattttttatttttattttttttataggtgttagatttttttgagattagggattttgagggagggtaggtaagtgtggtgttaaggggttttttttataattttgttttgtttagtttattatttaataaaatttaagagtttttagaaattaagatgtgaagaggtagttttgaaatttattggggagtagaaggaagttaatttagagttttaagttagtgatggaaaatttattaattgtatagtttataatgggatagaagaatgaattgtcgtttaaaatttgtttttttaggttaggtacgatggtttatgtttgtaattttagtattttaggaggttgaggtgggtggattatttgaggttaggagtttaagaatagtttggttaatatgatgaaattttgtttttattaaaaaaaaaaaaaagataaaaattaattaggagtggtggtatatgattgtaattttagttatttaagtggttgaggtatgagagttatttgaatttaggaggcgaagattgtagtgagtcgagattattttattgtattttagtttaggcgatagagtgagatttttaaaaaaaaaatttgtgaaaaaaataaatacgtaaatatataaaatttgtttttttaagatatatacgtgattaagaagtatatgaaataatgtttaatattattaatgattagaaaaatgtaaattaaaattataatgagatatcgttttatattagttagaatggttattattaaaaagttaaaaaataataaatgttggagaggttgtagagaaaacggaaggtttatatattgttggtgggaatataaattagtttagttattgaggaaagtagtttggtaattttttaagaattttaaaatagagttattattcgttttaggaattttattattaggtatatatttaaaggagtatatattgttttattataaggatatatgtatatgaatgtttattgtagtagtatttataatagtaaagatatggaattagtttaaatgtttattaatagtagattgtataaagaaaatgtggtatatatatattatggaatattttatagttagaaaggtcgtgtttacgttttttgtagtattatggagttgggggttgttattttaggtaaatttatataggagtaggaaatgaatattgtatgttttattttatagtggagttaatatgagatatatggatataaaaaggaataatagatattgggttttatttgagggtggaggatgggaggagaagaggattaaaatattatttattagatattatatttattatttgggtgatgaaataaatttttacgttaaatttcgatgatatataatttatttatataataaatttgtatgtgtatttttgaatttaaaataaaggttaaaataatttaaaataaataaaaaataaaattttatttggtatttttaaaaaataaaaaataaaatttgtttttttaggggaagaaaagtaggaaagttttattttatttttttagtggttttataatgtagggatttgtttttagggaatagggtatagtaggggaaatatataggggtgtttagagtttggcgaaaggtaggtgagttttgggtattgattcgttattagttattttttaaggagtttgagaggtgttaatttgcggtttatttcgtgagattgtttagagtgtaggaggatatggtttattagtttcggaaagtagttattataattgaggaggaaatgaagtttgattggttagaatagaagtaataatggaggtttatggagggattttttaggtttttatttttgatttttatggtggcgttgttttttttattttgtagttttgttttgagattagataattttgtattttgtttgtgttttttttttttttagtagttttgtttttgttatttgttttagaagggttttgggtttttttattttaggatagataagggtttttgtaattatttttttgggtaatttttttgtaaggaataggagaggttatttggttttggttttttgggagagtattgagaagaaaaagttaaattagtgggtagtttaggttgtatatattttgggaatattgcgattattttttttagtaatttacggaaatttattggttgttttgtagaaaaagaattaagagagataaggagatttgttgtttaagattaaggtaggatgacgtttatttagtaattgatgatgttaggttgaggtatttagtgatttgtttttatatttgtttttgtttatttagttaatttgtttttgtttgggatattggattttcgtgagttggaaggaatagatttaatatttaggggttgggtatttttatattatttatttggggggttaagggattcgggtaatatagtattttgtttagtgtttggagattatttatttaggttggggtttttgggataggcgaggatttacggattttggaagagttggtttaggggattgaattttcggtatttttatagagtagagtatgattatatttttgtcgttgttgttggggtttagtttgggttgtataggagtaggtaaggatattttttttggggattttttttttttttgtttttgttttagggtaagggtgtttcgttttgtaattgtatttgatattttagatagtttgtttttttggtatatatttttatagtattttgtattttgtagtaattttaatgtaattaatttgtataattatttgtgtagtgtatattttttgttggaatataggtaaggataatgtttattttatttattgttgtttttttagtttttagtatagtgttttgtatgtagtaagtgttttataaatatgtgcgaagtgaatatttaatatttttagtataatataaggttgatttttttttttgatttttttttttttttaataatttgttttattgaaggtttgtgttttgggtaaattgttatgtttaaatatgtaaataatttcggggggttatttttatttttgtgtttagttttgtataaagaggagattggatttaaaaatttatttattatttttattgatttttttaaattagatttttagaaattttagtgtatgagtttggttagtagatgttttttgagtaggaaatttgtgttagattagttggatgttattaaggtttaggttttgagttgaatataggaaaaattaatttttttttttttatatgtttatatttaatatttttttgattaattgtgtgaggttttttttttttttttatttatattaattaatttttttatattagttggatattttataatttaattttattgtgatattaattagagttaatatagatattaaaggttaaagatttagttttataagattgtttttattttagatattaattataagtagtaggtttttaaattatttatattttttgtttaatttgtttataaattagaggtttttatgattttttttttggggttggtaatttgttaaagtggtttatggaatttaggaaaagtttatttattattgtagattttttataaaggatattttaattgataataataattataaatatttatggggtggataatgatgttttagtatatgtaatgtatagtgattagattagattattattttatttattatttttttgtgttggaaatattttatattttttttttagcgatttgaaatgatataaagtattattgttaatgatagttattttatagtggtatagaatattagattataattttgtattttttaataaaggatattttaaagtatataaaggaatatttagatgaagagatattagatttggaagggttttaattataggagttttgtttttatagaattggggtattttattttttggtatgtggatgtgtttattaattgagaagttttttgaattttatagtttcgggatttttatggaggttttattatgtaggtatgattgattattaatttaatttttagtttttttttttttagggagtatgggggatgggattaaaagttttagatttttaattatgatttggtttttttggtgattagttttttttgtaggagtttattaagagtattttattagaataaaagatatttttgttatttaggaaattttaagcgattaggtattttatgttaggaattagggttaaagataaagttttgtgtagagtttttaaatatacgtttgtatgttttatatatttattatttgtgtatatttattatttatatatttatttatttattgttaggttagtagaagatattgatttgtttttttttttttggtttttttaggtggtttcgtggtttatgtggaaagtatttgtttgttggatgatgttgggattttaaaggattttatatattgtattttttttaataaggatttgttgatttgttgggatttagaggagaataagatggttttttgcgaatttggggtgttgaatagtttggcgaatgtttttttatagtattttaattaaaaagatattttgatgtagcgtttgcgtaatgggttttagaattgtgttatatatatttagtttttttggggattattgattaataggatacgtgaggagagaggggtgtagaggggttattaggaagtgtagttaggagggtaggttagggaggattttatagtggtttaggggtttgagatttgagtagtaaataagagaaaatgtgtggatttgaaatgtagaaagacggaggattgaattttaaggggaataaggtggttgacgtgagtggaataggagtaaagaaggggaggtgaggtttgaatcgcgaggtgttatgtggggagtttatgtagaggttggggtattttaggatgtatatttaagatgtttttgttttgttattttagattttgatgttttagatttgatgtgggtttaggtatgggaatatttggaattttaggggattttgatatatgtttttttttatttttaaatttttgtattgataatggtttgaagtttgtgaaagtaaatttgaagatttttatagtatagaatagtgtgttttaagggtggtttttgaattattttttttagaattgtttggaggaggtgtttgttaaagatgtaagttttttagtattattttagatttgttgaaagaaagtatttggggatatagtttaggaaatttgtattttaatataattttttggatttttatttaagattgtgtttgaaaaatgttaagatagaggtaagtaagaggattatttaggagagtaaattagtaaaagatggtagtattagtaatttttttagtttgattatatttattttaaatttaagagtgagttttaagttaggtttgtttttttgaattatgtgaggagaaaaagttttaattagtaaaagaacgtattaaataagatttggagaaaaattttttttttattttaaaaaaatttaatgtataattttggattatttttagtttttttattttaaatattttttagtttatgtatttgaaataaatataataatttttagaatagtttgtagtttagatttggtttttattaattgtaattaaatataattttggaggaggaaagaaagaaaggggtaatgaaggaatgggagagaagaaagagtaatgtaggaatatattttaacggtttttttttaaggggtagtatggtagagggggttggggtggaaagtgggttgtaaaatttacgaagagttgcgatagggaagaaattaggttgaggaagtagttagaatgttatttttttttttaaatatgttttttttttttatgtagggttattatttgtgtaagtagttaaaattattttttttaatacgagggagtttgtgatgttggtttgttatgtgtggggtttttatttagtagaagtgattattacgtggaggaagaacgggaagtttgttatgttttatagtagtgcgtataagattgtttagtttaatggagattggatatattagatttttttttatttagttttaatttttttttacggggatatttatatttgtgtggtagagtatattggggtttttgagtttatttttcgggattggagtaagtgtatggtagatggatggaattagggttaaagtagagaaaatgagatgtggatcgatatatggtatatggtagatagcgaagtgttgaaaatggggattgagtttggaggaatttacggggggtttaggattagaatggggaaatgggataaagaaatggaaatatttaggttggtgtaaaagtaattgtagtttttgttattatttttagtggtaaaaatcgtaattatttttgtattagtttaatatttagtttgtgttattgttgttttggtggtgtggttgatgttgttgcgtttatgtttgagggtgagaggggagcgtgtttgttttgaaatgaggatgtaaatttggtaattatatttttagaattttaaattgtaatatattattttagtttttttagattttaattattttggtgttagaagtagatgggagttgaaggaatgatgaaggttgaagaaggggggttttttttggtgtggggtagtattgtatttggtttgttttattaagtatacgggagtagtaaagttacggttggtagattatttggtatgtatgtttaggggttagtggataaagaattatttatagtttaaatattgtttgaatttagtgtcgggagtagttaaaggtatcgtgagaagttgtatatagttttggggatttttggaaaagaaagaggaagaaatgaggaagaggaagggtgtttataaagggttagagaataggattttagattagttgttgtaattaggtttttttttgtgggaagtgttgttttttgttgggtagttgggaagggaatggagaatagagaagagagtggaaattatatgtttatttgaatttttttggggaacgtttttttatagcgtgtataagagtttttttttagaaatggagtgtttattttattatgggaaaagaatttgagtgggatatgatttagaataggatcggtttaaggaagtgtaggggttgtggagtgggatggagataagttttgaaaggatatatgggagatttagatgtagaaggtatataagtagtaggataatttataggatggatttattggaggttaagatatgtggtaagatagtgtaataggaagttgtttagttggagaaagtaaggaagtaaatattgttatcgtgggggtaatggagaggatagtgaggagttttttattttgataagggtggttttgaggtaaaggaaggaaagaggatgttttgagaggttttattgtattagagaggatttggaagttaggatgttaattttggggagatggattttttaggtttattttaggagtagaggtttatgggacgagggtttgatttgagaaagattatttttttgggagtgggtggtgtgagttagatttttggagttgggataaaggattttttaatttattgagaggtggttgtaataaatggaattgttttgggggtgagtaatagaaattgggttaagtaagtttttattttttgtagtatttgggttgttttttatgtagattttgaaggtttttgtgtttgtagtgattttgggtttgggttttattatttttttttttggtgtgattagttggcggagagttggttattttagtgagtgattcgttgaatttttatttttatttttggttttattttttgtttattttttgtttgtgattaatttttttttttttattgtatttgttatgaatattgttagatatttttatttataaagattggtataattaagtattttttttttttaggttatatttttttttttgggtttaattatttagaaggtaatatttttgttggtttgtttttttatttgttttttggtaggggtgcgggttagaggggttagtgttgggtttaattaattttgattattatatgggtgagtttttatgaggatttaggtaagggtatgatttaagttgttattgttaggattaagagtaggaaggagtattttttttttttattaagtgggatgtttgtggagaggaggttgaaggtgttttttttgtattagttgttggtgttttggagtttttagtattattgtattaaggtatgggatggttatagtgataaacgatgggggtaagttgggttgaagttttattattttttttttatttattttgtaggatggtatattttttagaggtagaattttataatttttattttaagtgagaaggagatttaaatttaatgatgttattatgtttttttaatatttttaattttttgatattattttggattttatggtttttttatttaattttttgaattttttagttttttttatgtaaaatttagtaatttgggggattttatttttgggattatgttgtaattaaattattgtttaaggttatatttttgggatgaatataatttgaggaagggagttaaagatttttttggggtttttagtgtgttatagaggatagtaattggtgattgttttagagaaataaattttggtggaaatattgtttttttatgttttttttttggggttttggggaaggaatatgggtaaagtagggattgaggttaatttttttttgtttgagtaggggagaaattaatgtttttttttatttttttatttagatatgatagaatttggggtcgttttttgatttataatttataaggagaaatttaattgtggtgggttggagttatagagtatgggtaaggaagggaattaatagtttatttattttatataggattttatgaggattaaatgagtttatatttgtaaatggttaagaatatcgttaggtatatagttagtttgtaatagtgacgttagttatattcgattatttaattttttggttaggtattgtattaggtgttttgatttttattataatcgtaaggtagattttttatattttttaggatttaggggatagagtttaattttagattgagttttagatagttattttttttatattttgaatgtagaagggaatatagtttgagtgattattatgttttaggtattggttttagatttttatatttgtagtttattttttttttataataattatataagggatagattgtttttttttatgttatagataaaagatgtgaggtttagagatatttaagtgatttgtttaaggttaaagaatagatttttgtaggatgtttgtttatttgagttggaagtagtagattattttattttgaagatttttatgttggtgagtatatatttttttagagttatcgttttatttttttttattttaagattaaggagagttttttgggggaatggattttattttaaggaagagaggatgttggttggtggtttgttgttttacgaagggcgatatttgttggatatagaaatttagggtgtggaattgtttttggaattagagttagatattagaatatgggtaagaaaaagaaattaagaaatgagttgatttggaatatttttataatttttttagaagtatttttggaattagagtattttttttggaaggggttaatagaagaagttagtggaaggaatttaatttttatattttattatttttatgttttatttttattttttttatttattgtttttgtttttatttttgtttgtttgataaagtaaattttttttgaaattttagtttagtttaggaatggggggttttgggttttgtttatatttgggtagttttatttattatttttattttatttatttattttttttcgagatagagttttgtttttgttgtttaggttggagtgtaatggcgtgatttcggtttattgtaatttttgttttttatgtttaagcgatttttttgttttagttttttaagtagttgagattataggcgtgtattattatgtttggttaattttgtatttttttagtagggatggggttttattatgttggttaggttggtttcgattttttgattttaagtgatttatttgttttagttttttaaagtgttgggattataggcgtgagttatcgtattaggtttatttggatagttttaaaggagaagttgtagatttgaagggtttagttttagttatagtagtgggaattaaagtggtaggattttagagaaaggaagtagagagttagttaatgggacggtttttagttttttttttagagatttttagtgtaggtttttttttgttttaattttgtaggttttttgttttataggaaaggttgtttttttttaggtaaggaatagggaaaagtatatgtaggtttgttaggatttagaaagttagaatattataggtagaaaggggagtttttatataggggaatgagtggtatttgaaaggaaggtggaagaagggtgatggtgtattaattgtaggaggatgaggagaagagaatggatgttgtatgaggagaatggaatgtaaatataatggattgttaaaaaaggagtgcgtgtgtgtgtgtgtgtgtgtgtgtatttgagtatatgtgagagaaagagaggaaaaaaagagaaggagtggaagagagtaagagagagggagtaaaagggtgagaggagagaagtggagtgggagaaagaaggagagggatatagagagagggagggaggggagcgggggaagagagagagagttggattttcgggttatatataatttaagttgtataaagaattgttttcgttttttaatgttttgttgttttaaaagttgaatttggagttagaattggttttaaaggttatttagtttatttttttttttatgaaagaattgggtttgtgttaataagggtatatatagtgtagggagtttttttaatatttggggtagataataatattttagagaaacgcgttgattttatatttgagtttttttttttgattattaaagataatgagaataaattttaaatatattacgggaggtggtatttttggtattttttttttttttgagggagagtatgtttttaggttttaggttttttttgtttttttatttacgaatatatgtatgtgaaagaaatagataagattgatatttaattttaatgtttatttatgaaaattatttttaggttatttttttaagtttttttttttttaaagtaaaattgggtaaattagatgaaaaacgagggtggagtttaattttatttttaaatttttttttttttttggtttgagtgtttgttatttttaagagttttttaattgttttgaagtaaggtatgggggattttttcgtggtgttttttgttattatttggttagattagtttttaggggttttagagagtggagaggttttaaatttatagagattatttttagatggggggttttttgtttttttagatttttttttttttattttatatgaggtttttaagaggtttttggtcgtgttggtttggggtagggaataaagaaatggtttttattgtattagagttttaatagaaaatagatggtatattcgaaataggatattttaaggaaagtttatttattagtaaagtatttataaagaattgggtggaggatagttgttattattttaaggtttaaagaggtcggggatagaaggggttattaggatttagaaggatagtaagttttgtatagttattattttgttaagggtagtgttttttagttaagggatataatagtttaaggtgattttgtagggaggaagttaagggattagaaatattgattttattttttttttttttttgtttttaggttgatgttggaagtaagaagaagttagggagtatgggagttatttaatgttatgtaggttagtatttgaggtagattttaggtgtagaagtattgagagtgggtttagaaggatagatggaggataggaagtatatttataataagaaggaaaaacgttaatgttgtggggtggagagagaggtgtaaaatttgggttttttttggttttggataatgataagcgtatagtagtaatagaaattaagtttgtagttttttattggggagtttgggaggatatttatttttagttttgttttttttatttgaattttgattgtggttatattgaatttatagaaatttggggttaattgatttgtttttattattaaattatattatgtaaaaataggatgtttttttatttattgaaattattttgtttgttttttattatggtttttaaattttatttttttatagtagttttgagtatgtttagttaatttttaggtatgttgtagtttttgttgttattgtgattggtattttattgtaattttatttttgaattagtaatttttgatgtagaagaatgtatttaatttaaaaaattgtggttaaaaaaataatatttatcgttttaattattttgaagtgtatagtttagtagtgttaagtatatttatatttttgtgtaattaatttttagaatttttttttattttgtaaaattagaattttatatttattaaataataattttttatttttttttttttttagtttttggttattattattttatattttgtttttatgaatttgattattttagatattttgtataagtgtaattatggagtttttgttttttggcgattggtttattttatttagtttaatgtttttaaaatttatatttgttgtagtatgtaagagtgttttttttttttttaggttgaataataagttattgtatgtatatgttatattttgtttgtttatttatttgtttatggttatttttgttgtttttattttttggttatcgagaatagtgttgttatgaatatgggggaaaatatttgtttaagtttttgtttttaatttttttgtatttatatttagaagtggatttttgggttatatagtagttttattattgattttttgaggaattgtcgtattgttttttatagtagttatatattttataattttacgaatattgtatataaaggttttaatgtttttatatttttattaatatttattttttttttttttttttttttttttttttttttttttttttttttttttttttttatttgtttttttttttattttttttttttttttttttttttttttatttttatagtagttatgttaatgagaattagatgatgttatggttttaatttgtatttttttaataataagtaatgttgagtatttttttatatgtgtgtttgttatttgtatattattttcgaggaaaaattgtttgtttgaaagttttgtttgttttttttttaattgtttgtataaataattattgttgggttttatgagttttttatatattttgaatattaattttttattggatatatgatatttaaatattgatatatgatttttaaatattagaaattaataatttttgtaagttgattttatatgggataattttgttcgatttttttattggttttagtggggtttttgttgttgttgttgttattgttgttattgatattttttttgtttttttttttttttaggtagataatagtattatttgcgagtattgttttgtgtttttttttttaatttttagtgttttattttttatgttgtttgattaggatttttaatgttgtgttaaatagtagggtgataatgagtattatttttaaaggaaataaatttaaatatttttattaagtataattttgttgtatattgtagatttatatgtagtggtaagaaataataaaaataattttgtgtattttttatttagttttttttgatggtaatattttgtaaaattatggtataatattataattaggatatatggatatagttataatatagaatatttttatgattataaggattttttattttgtttttttttagatatatttatttttttattattttatattttttttaatgtttagtaattattaattttttatttatttttatgattttgttattttaagataaatttttttttgttattttaaaataaatgattaataaatggaaatatatagtatatatatttttgggattgattttttttttttttaatgtatttttttggagattatataaggttgttgtatatattaataatttattattgtttagttgtattatatggtatgggtatagtatagttagtttagttatttgtttattatatttgggttgtttttagatttggttgatatgaatataagtttttgtgtggatataagttttaatgtttttggagtaaatgtttaggagtgtatttgttgaattgtatggtggttgtatttttagttttttaaataaattgttaaagtgttttttagagtggttgtattagtaatgtgcgagtgattgttttattgtatttttataggtatttggtattgttattattttttttattttttttgagatggagttttgtattgttgtttaggttggagtgtagtggtgcgattttggtttattgtaagttttatttttcgggttcgcgttatttttttgttttagttttttaagtagttgggattataggcgttcgttattacgttcggttaattttttgtatttttagtagagatggggttttattatgttagttaggatggttttaattttttgtttttatgattcgtttgttttagttttttaaagttttgggattataggtatgagttattgcgtttggtttattgttattattttttattttagttattttaatatgtgtgtagtgagattttattgtggttttaatttgcgtttttttaatggttaatgatatcgaatatttttttatgtgtttatttgttatttgtatatttttttaatgaaatgtttttttatgaattttttttattttttaattaattttttttaaattgttgattttttttttttttttttttgagatggagttttattttgttatttaggttagagtgtagtggtatgatttcggtttattttaatttttattttttgggattataggcgtgtgttataacgtttagttaatttttagtatttttagtagagatagagttttattatgttggttaggttggttttaaatttttgattttaagttatttattcgttttagttttttaaagtgttgggattataggtatgagttagggggtttggtttgagttttgataagttgttatatattttagatattagtttttttttggatatatgatttgtaaatatttttttttattatgtagtttgtttttttatttttttataagttttttatagagtaatagtttttagttttaattaggtttaatatatttatttttttattttatagattatgtttttggtgttaaatttaagaatttgttgtttagatttagatttagaagatttttttttattttattttaaaagttttatagttttatattttgtatagaagtttgtaatttatattgagttaatttttgtagaaggtatgagttttagattaaattgttgtttttttttttttttttttttgttgtttttttttttttttatggtttttgaatgtttaattgttttagtattatttatgttttttcgatgtttgtagggtgtgtagggatattttttgtggatatttttatatttttttttttttttttgttagtgtagtttgttagaggtttattagttgattgatttttttaaagaagtaattttttgtgttttattttgtggtttaggttggagtgtagtggtgtaattttattttattataattttcgttttttgggtttaagtgatttttttgttttaattttttaggtagttgggattataagcgtttgttattatatttggttaattttttgtaattttagtagaagtagagatttattatgttgggtaggttggtttttaatttttgagtttaagtgatttatttgttttggttttttaaattattgggattataggcgtgagttatagtgttcggttttttttttttttttggatgtattttgattttttttttttgggtttttgagatgagagtttgaattattaatttgtgtatttttttttttttttaaagagataaggtttttttatgttgtttaggttggtttcgaattattgggtttaagtgatttttttttgttttagttttttaagtagtatttagttttttttttttttaatgtatgtatttaatgttataaattttttttttagtattggtttagttgtgttttataattttttttattattttgaaaatatttcgtgggtttatggtaggtgtatatgtttatggggtatatgagatgttttgatatacgtttggaatgtgaaataattaaattatggagaatggggtagttatttttttaagtatttattttttgagttataaataatttaattatattttttaagtaatttaaaaatatataattaagttatttttgattatagttattttattgtgttattaaatagtaggttatatttattttttttattttttttgtatttattaattatttttattttttcgtttagttatttattattttttttaggttttggtaattatttttttatttattatgtttattagtttaattgttttgatttttagattttataaataaatgagaatatgttatgtttgtttttttgtatttggtttattttatttaatataatgatttttagttttatttatgttgttgtaaataattggatattatttttttttttagttaaatagtattttattgtatgtatgtattatattttttttatttatttatttgtcgatagatatttaggttgtttcgaagttttagttattgtaaataatgttgtaattaatataggagtgtagatatttttttgaaatattaattttttttttttcgggtatatttttagtagtgggattgttggattatatggtagtttaattttaatttttttggaggaatttttaagttgttttttatggtggttgtattaatttatatttttgttaatagtgtataaagttttttttatatatttattagtatttgttattgtttgttttttggatataagttatttttttttgagatggagttttatttagttgtttaggttggagtgtagtggtttaatttttgtttattgtaatttttattttttaggtttaagcgatttttttgttttagttttttaagtagttgggattataggtatggtttattatgtttagttaatttttgtatttttagtagagatagggttttattatattggttaggttggttttgaatttttgattttaggtgatttgttcgtttcggttttttttagtgttgggattataggtgtgagttatcgtgtttagtttgtatataagttattttaattgaagtgagataatattttattgaatttttgatttgtatttttttgatgatttataatgttgagtattttttataagtttgattgttatttgtatgtttttttttgagaaatgtttatttagattagtttattttttgtttggattattgaattttttttttttatagagttgtttgaattttttatatattttagttattaattttttgttagaggggtagtttgtaaatatttttttttattttgtgggttgttttttttagaaatttttgatatgttgtatttttatttttttttaatttagtgtatttttaaattttttttgagatttattttttgattcgtagagtatttaaaagttttcgtttagttttttgatttttttttgttatttttttgttatttatttttagtttgattttaatgtagttagagaatatattttgtataatttatatttttttaaatttattaatatttgttttatggttttggatatagtttaatttggtatatgttgtatggatattttaaaagaatgtatattttgtgcggttaataagtatgtgaaaaaaatgtttagtataattaattattagggaaatgtaaattaaaataatgatgagatattattttattttagttagaatggttattgttaaaaagttaaaaataataggtgttaataaggttgtggagaaaaaggaatatttgtatattattgggggtaatgtaaattagtttaggtattgtggaaagtagtttggagattttttaaagaagtttaaagtaaaatttttatataatttagtaattttattgttgggtatatatttaaaagaatataaattgttttgttataaagatatatgtatatgtatgtttattatattgttatttacgttagtaaagatatggaatgaatttagatttttttatttagtgtttattaatagtgtattggataaagaagatgtggtatatatatattatgaaatattatatagttataaaaaatgggattatggtttttgtagtaatatagatggaattggaggttataattttaaataaattatcgtaggagtaaaaaattagttaattgtatatatatggatataaatagggaaaaatagatattggggtttattgagggtggagggtgggaggatagtgatgattgaaaaagtatttatcgggtattatgttgatgattttttttttgttgttttttcgttattgatttttaatttgattttattgtagttagagaaaagtttgtataatttaaatttttttaaaattatttgtatattaaatttttgtgatacgtaatttatttatgtaataaatttgtatatgtattttttgtatttagtaaaatcggaaaagaaaaataataaaaaagagttaatgtgtattttgttattgatgggtggagtgttttgtaaatgtggatttgattttgttggttgatggtgttattgagtttttttatatttttgttgattttttttttagtttttatttttttatttttattttttttgagatagagttttgttttgttttttaggttgttggagtgtagtggtaggattttagtttattgaaagtttcgtttttaggtttacgttatttttttgttttagtttttcgagtatttgggattataggcgttcgttattacgtttagttaattttttgtatttttagtagagtcggggttttatcgtgttagttaggatggtttcgattttttgatttcgtgatttattttttcggttttttaaagtgttgggattataggtttgagttattattttttgttttttttttagttttattaatagttgtgagagttgtgttgatgtttttaattataattgtggattttttatttttttttttagtttcgttagtttttgttttatatattttatagttttggtgttttgggtataaatatttttgattgtaatgtttttttgatagattgatttttttattattataaaacgtttttatttttttttggtaattttttttgttttggttttgaagtttattttatttgagagtagtatatttatttttgtatttttttaattaaggaaaatatgttgtgtttttttttatttttttatttttaatttgtttatgttgttatatttgtgtggttttattgttgtttttgtttgttttgtgttttttttgagataaagttttattttgttatttaggttggagtgtagcggtataatttttgtttacggtaatttttgttttttagggttaagcgatttttttgttttagttttttgagtagttgggattataggtgtatattattatgtttggttaatttttgtattttagtagagacggggttttattatgtaggttaggttggtttcgaatttttgatttattttaaattatttatttggtttagttttttaaagtgttgagagttattgagtttggtttatattgttatatttgaattgggtttttttttgtttttgtttttgttttttgtttgtttgtttttttttgtagagtgttgggtttataggtgtaagttattatgtttggtttgaattgggttttttaattgaggtatttagattatttgtatttagtgtaatttttttttttaatttttatgtttaattattatgggtatataatcgttgtatatattagtgaggtatatgtgatgttagttataggtatataatgtgtaatgattaaattagagtaattggggtatttattattttaagaatttattatttttttgtattaggaataatgtaattattgatatatgtattagtttggggtgttataataaaataaaattaggtggtttaaataatagaaatatatttttttatagttttggaggttggaagtttgagattaaggcgttagtatggttagtttttggtaagggttttttttggtttatagagagagttgttattttttgggggtagagtgagagagaaagagagaggaaggttgggagggagaaagagtaagagagtatattttggtttttttttttattgaattaattttattgaattatggttttatttttatgaatttatttaatttgaattatttttgtaaaaggttttatttttaaatatagttttattggtggttagggttttaatatgggattttgtgggatataatttaatttgtagtaatatgaagggtttaattgttttttatttattttgtttgttttttttagtttttatttttgtttatttttttttgattttttgtggtttatttgggtattttttagaacgttagttttatttatttatagtgtttttgagtgtattgatgtataatttttaagtggttgttttaagtattatatatatatgtaatttgttatagtttgttggagttattatttattattttgagtaaataataaaaattttatttttttaatttatgttttatttttttattttttttattgaaaatacgattgttttaaatgttttttttatatatatttagaattatattagtgttataattttggttttaattattaaatatattttagaaaatttaagaggagaagaaaaatttattgtatttatttatttatttgtttattttgttttatttttttttttgatgttttaaggtttttattttattatttttattttgtttagataattttttttagttatttttattatttttgggtaggtgtttttttttcgtttttatttttattgatattttagagagggggttttattattggtttgtagaaatgaaatttttagttttttaattggtttttttggatattattgtagagtgatgttggagtattttgttatagttttaagagggtgaaagtttaggttttttatttggtttttttggtgtgaatggtagtagagttatagttattgttatggtatttgtttagaattgaatagttattttttaaggtttgataggtttgtttgtttttgttttggttttttggttagtgatattagggtttttgttgtaagtgttgttggggttttttttgtttgtttgtttgtttgtgttagttggtttttttaaattgttattttttttagttttaagtttagtatatatgtggtaaaaagaaagtttagggaatttattagtatgttattttttagattttgagattttagttgttttgtttttttatttttattttttagagtttttttatgtttgttttatatatatataatgtttagagtttttagttgtatttagtgagatgaataggaaaaagtatgtttatttaatttttttagaagtttttgttgttaatttttattaaattagtaggtttttttttatttttggttttttaaaagtttattttttaaatataaatggttttttatatttaaaaaatagtttattagaattgatttattttattgtatttttttttttaattttttaatatagtgaattatattgagagatttttaaaatgtgaaatatttttgtatttttgggataaacgttatttgtttattttatagttatatatttattgttggtgttatttagttaatattttatttgggttgttgtatttatttttataaagtatggacgtaaaatttgttttttttgtatttttttgtttgtttttgtaataaaaatttttttaaataataatttaggtagattttgttttttattttgttttttggaataataaatagaaatgtttttttaaagggtagtttttgtttttgtttatttattttattgtttttattttttttttttttttatgattatttttattatttttttttttttttgggtgtattttgtttttttttatttagcgtttgagttgaatatttagtttattgattttggtttttttttgtgttttttagtaagtgtatttaaaggtaaaaaatttttttttaagttttgttttaattatatttaatatattttgatatgtagtgttttaatttttatttaattttatatattttttatattttttttttaatttataggttatttgtgatatttaaaaattttttattttgaagtaattttagaagagtagtataaagaatttttacgtatatttgtttaaatttaatgatttgtaatattttgttatatttgttttttttttttttttgtttttgtttttttttttgttttttttttaaaaaatattaatatttttaagtttatttagggatttattttaaatggttatgaaaaaatattagagagaaaaaatggtttattttaaaatggttaggaagtttggagttatatatatatatgttttttttttgttaaatattttaatgtattttttaagaataaggttgtttttttatataaatatagaaaaatagttatattaagaaaatttaatttggatataatattagttaatttatagtatatatttaaattttattagtttttttaataaagaattttataattttagttatttttagttttttgttttgtaatttagaattaagtattttagtaagtttttatgtttttttggttatttttaatgtgagagagtttattagttttttatttatttaggttttattaattagtttgaatttatataattttattattttgttttttaagaattttgttttttttttttttttttttttggtttagtttatttattagtttttgagagagggtttgtaaaaattattaaatgtatttttaaaaaatttaatttttaattgtagtttttttatttgttgttttataaattgtgaggttgtattgttgagtttatatatatttatgattattatatttttttgtttttttaaaagttatatgaatatttttttttttgttttttatgtattttattttttttatttttatttttttttgagatggagtttcgtttttattgtttaggttggagtgtagtggtatagttttggtttattgtaatttttattttttaggtttaagcgatttttttgttttagtttttcgagtagttgggattataggtgcgtgttattatgatcggttaatttttttgtatttttagtagagatggcgttttattatgttagttaggttgatttcgaatttttgattttaggtaattcgttttttttagtttttcgaaatgttgggattataggtatgaattattgtatttggtttaaaatagaatttaaggttaaaaataaagtgtaggttggacgtcgtggtttacgtttgtaattttagtattttgggaggttgaggtaggtggattatttgaggttaggagtttaagattagtttaattaatatgatgaaattttaattttattaaaaatataaaagtagtcgagtatggtggtatatgtttgtaattttagttattcgggaggttgagtagggagaatcggttgaatttaggaggtagaggttgtagtgtatcgggatcgtattattgtattttagtttgggtaataagagtgaaattttgttttaaaaataaataaataaataaataaataaataaataaataaagtgtataggtcgggtacggtagtttatgtttgtaattttagtattttgggaggttgaggcgggtatattatttgaggttagaagtttaagattagtttggttagtatggtgaaattttgtttttattaaaaatataaaaaattagttgggtatggtggtatatttgtaattttagttattcgggaggttgagataggcgaattatttgaatttaggaggtagaggttgtagtgagtcgagattgtgttattgtattttagtttgggagatagaggaagattttgttttttttttaaaaaaaaattaattttattttgttatatattgagattgttgtttaatttttttttgtgttatatttgttattaggtaaattttttttttttgtttttaaattttaatttttatatatttttttgttttaagaggatttgttatatgtatttatattaaaaatttttaataaattaggtattgaaggaatatattttaaaaataataagagttatatatgataaatttatagttaatattttgttgaatgagtaaaaggtggaagtattttttttaaaaattagtataagataaggatgtttttttttattatttttatttaatatagcgttggaagttttggttggggtaattgggtaaaagaaataaataaagacgtttaaataggaagagagaaagataaattatttttgtttgtagatgatatgattttatatttagaaaattttattgttttagtttaaaagttttttaagttgataaataattttagtaaaatattagaatataaaatgaatgtgtaaaaattattagtatttttatatattaaataatagttaagttgagagttaaattaggaatgaattttcgtttataattgttataaaaaaaataaaatatttaggaatatagttaattggggaggtgaaagatatttataaggagaattataaattatcgtttaaagaaattagagatgatataaataaatggaaaaatattttatgtttatggataagaggaattaatattattaaaatggttatattgtttaaaataatttatagatttaatattttttttattaaattattattgagatattttatagagttagaaaaattattattattattattatttttttgagacggagtttttgtttttgttgtttaggttagtgtgtaatggtgcgatttcggtttattataatttttgttttttaggtttaagcgatttttttgttttagtttttcgagtagttgggatattataggtatgcgttattatgtttagttaattttgtatttttagtagagatatggtttcgttatgttggttaggttggttttaaatttttggttttaagtgattttttttgtttcggttttttaaagtggtgggattataggtttgaggtatcgtgttcggttagagttagaaaaattatttaaaaatgtatgtgaaataaaaaagggttagaatagttaaggtaatttgaagtaaaaagaataacgttagtagtattatattatttaattttaaattatatagggttatagtaattaaaataatatggtattggtataagaatagatatatagattaatggaatagaataaagaatatagaaataaaattatatttatgattgtttgatttttaataaatttgataaaaataagtaatggggaaagtattttttatttaataaatggtgttgggaaaattgggtagttatatgtagaagattgaaattgtattttttttttatattatttattttaatttaagatggattaaagatttaaatataaaatttaaaattataaaaattttggaagataatttaggtaatattatttaggatatattggtaaagattttatgataaagatgttaaaaataattgtaataaaagtaaaattgattaataggatttagttaaattaaagagtttttgtattaaaaaggaaattattaatagagtggatagataatttatagaatgggagaaaattttgtaaattatgtatttaataaaggtataatatttagtatttataaggattttaaataaatttataagaaaaaaaaattattaaaaagtgggtaaaggatatgaatattttttagaagaagatatatatgtagttaatacgtatatgaaaaaaagtttaatattattgattattagagaaatgaaagttaaaattataatgagatattattttatattagttagaatggttattattataaagttaaaaaataatagatgttggttaggttatggagaaaaatgaacgtttttatatcgttggtgggagtgtaaattagtttaattattgtggaagatagtgtggtaattttttaaagatttaaagatagaaatattatttgatttagtaattttattattgggaatatatataaaggaatataaattattttattataaagatatatgaatatatatgtttattgtagtattatttataatattaaagatttggaattaatttaaatgtttattaatgatagattggataaagaaaacgtgatatatatatattatggaatattatgtagatataaataagaatgagattatgttttttgtagggatatggatggagttggaggttattatttttggtaaaataatgtaggaagagaaaattaaatgttagatgttttgatttataagtgggaggtaaattgtgaaaatatatggatatatagaggggaattgtatatatgggtttattggagggtggaggtgggaggagggagaggtttaggaaaaataattaatgtatattaggtttaatatttgggtaatgaaataatttgtataataaatttttttgatataagtttatttatgaaataaatttgtatatttatttttgaatttaaaagttaaaaaagagtatttgttataaattatatatgatttggtttttttttttttttattattagagtttttgtttttttattggtaattgttgaagtaaagatttatttttgtaatttattttatattttgtttttattgtataatgttttttttttttttttgttttttatttgatagattgatttttttttgttgtattaaaagttatatatattgattttgtttttatggtggttgtttttaatttaatatagtgagtatttattttttaaaatgttttaattattttaatatttatattttgttttttaagttttttagtatatttttatgtttttttgattttttatttttttttttttaatgttaatttttttattaagtagatattatatatatatatatttatttatttttttttaaaaatatggttttggatttgttgataaattatttttatatttgttgttgtaaattttttgatttgattttttttttgtgtattttttttaagagtgtttttttttttttttttttttacgtttaagagtgttttaaatatgagtttttggattttttgtatgataataaatttgttatgttattttatttgaatagtaattttgatatatataaagttttaaattttagtttatttttttttattattataaaaatattattttattttatttttgtatttattgttgttgaaaagtttgatattaatttgattttatttttttgtaaattgtttttttttttttttttttttttgatagggtattattttgttatttattggaatttttatttttcgggtttgttttagtttttcgagtagttgggattataggtatacgttattaggcggggttaatttttgtatttttagtagatatagggttttattatattggttaggttggtttcgaatttttgttcgtaagtgatttattcgtttttattttttaaagttttaaagtgttgggattataggcgtgagttattgtgtttagttgataaatttttttttttaagttttaaaaatatttatttgttttaatataacgagtataggtgtggatttttttgaagtttttgttaagtattttttgaatttttttttttgaggttttttataattaaaaaaaaattgtaaatttattagttattatttttttacgtatatatttttttttttttattgtgagtttttttatgatttagatgttgatatttttatttttagtatatattttgttgaatttttttttatatttttgatgtttttatttttttttattgttttttgggattattttttattttattttttattttataaattattttttagttatatttattttggtatttgtttaatttatagtatttataatttttattgttatagttttaatatttaatattttgtttttgtttttgtgagttattggttttgttttatgttgttggtattttttattattttaagtatatttgttattttgttttaagtttttggtttattttttttataattttgtattagatagtatatggtgttaatttgttgtttatgttttgtaatttttttgttttttagttatattattatgttgatttgtgagtttacgtttttaggagggtattagttagtttgtggggtaatgtgtaatggggaagagataaagttaaatattggtttgtgtttttttagatttagttttggtagagagtttagaaatattgtggatttttttatttgttattatttttttaggtaatttttaggaaaagtatagttgggagtaggtaggtgttttacgttgggatttattagcgttgggagttggggtagtggtcgtgagtagtggagaagagaatatttaaaagtttatttttagttttatttgttttttattgatttattttgaagatataagtagtttggtttgttgtagtttgtttatgtatgaaggggaggtaataattgttttaagtcgattgggaaggatatagtgtagaaattaaaaagtttttttgtagtttgtttttttattgtggtttattttttaggatgtagttttgtttattttttacgtatattagtttaagatagtagttttgttttttttggtaaatataaaaatattttatatttatttttggtgttgttagttttttagatttttgtttttttttgtttttttatttttataaaaattaattttgggtgagggagttggaagtttgaatttatttatttgttattttataggaattggaagttttatttttggtttttaaagggtaaagtgataagcgatatttaatagtttatggtttgaggttttttgatgtttagggttttatattcgtagttaggattgatgtgttgttatagttattttaagggtttttttttaaggtgtttaatggggtggtaagtagggattttgatttatttatgttttagggataggagagaaaggaatttggagatttatgaggtaggtatgaagtttggatagtgggaggggaggaagatagatgtgtgttgagtatttattgtgtattttattgagtttttgttgggtatattttgagggttaatttattttatagaatttaggaggaatgtttttaggggtatttttaggaaagtatttatagatttttaggaggttgtgtggtgaagttatgtttatattattagataatatttattttataggttttatgatgtataaatttgttttttttttaatttataatagaagtatttatatgatttatgaatttttttagattagtttttttaggttattttagttaaatattgagggtgtttagtatttttagggtgttttgttgtagttgtttttagttggtttcgtttttttttattttttaattggtttttatttttattttttttttagtttgttttgatagatggtagatgtatttttttatgtggtagtgtttggtattaggtttgtagtaaatgtttgttggattgattttttttagatttgaaggttaaaaagagagtttttttttttataggtatttattttaattttttttttttgtaatgtttagtagttgttattaggaagggttgttattaggttgtgttttaattggaatgagtttttgagtgggagtaagtaatgtttgttggtaggttaaagggttaataatagttttaagttttttttttttatgggaagatgaattttagtttattttatatttattgtttttttgaaatgtattgtttggataaatgtgaaatgttagttgtattttaaaaaattatatttatttatttatttatttatttataagtgtggaaatgatttttggttggtgaattatatttatgttgggtagattgcgggtaggtatttagatttggtggatttatatgattagattcgtatgaaaatttgttgggaaatgtaggttttggattttgttatggtgtgttttttgaattcgaatatgtttgtttttttggaatttttatttatgggttggtataagatgtggtttttgttatgtgagagatttttttattttagaatggttttttcgtgttttttttttatttttgtggttttgtttattatgattatgtatatttttatgagatgagagggttaagaattagtatttagaatatataaagatttttgatgaagatgtttaatgttgttaggttgataagttatgtttttatatttaatatttttttataaagttaaataaataagttgtcgtataatagtttattaagttttttgagtgtgtatgttaatttgaatttaaggtataattaatttgtatgaagtaagtattgtaggatttttttttttataaaaataattttttttttattgttgaaattttgttgtaaataaataagtggtaagtagaggattataaaatgttttttgtttaaagttttaaaatttttaaaattttagtatttaaatttttttggatagaattggaattaaaatgaagttatagttaataataaaatattatatttgtgtaatgttttgaatattttaaagattttattttattttttttgtttttttttttttgattgatttaatatggttttttttgtatttgtaaaaagatgattttaaaatttatttttttaattttgaatttattatagtatttgatatttatgtatgttattatttagaagtaaaggaaataaaattattgaaatgatattttgaaatagatttggtaggatttgaaaatttattgaatttaatttttttatttagatagttgagtggatagtggtttaatttattgaaagaggaaatataagggaaggatatgtttgagaggtgtttagagaatgattgataaaaggttttagaagaggtgagtgtttattatttttgtattggagtatttatttttgttttaaggttttttatgtttatatttgttggggatgatgggagggttagaagatagtttattttatggaaataagagtagttaggttatatggagtaggtcgggaagtaaggaggtttaggattaaggaaaggtttatcgaataaatattatgaaatgtttagttggtatatgaagagtagtgagggttgggggtattaggattataatttatatttagttttaagatgtttggattattttatagttgggatatggtttttttttaaggaagaatatgggttgttttttttatatttttgattatagttggtaagaaggaatggttggagtaatagattagtagttgggtttttagatttgttttttaattaaatttttatggttaatggtaagatagaatatgtttatataggatatttatttgaaagttgtgttatagataatatttattagaattatttagggtattttatgaaaatgtagatttttgaataatttttagaattgttgaattaggatttttgggttggagtttgagaatttgtatttaagtttattttttagtaatttttatgtatattaaaatttaagaagtatatgtaagttggttaattatgaattatttttattaatgaaaaattatattaaatgagaattaaatgggataattggatattttattgttttgaagaagttggtgataattttatttaagattttttagttgtttttttagtattatttttaaatttattattgtagtttattttttattaaattttttttttattggtataaagaaaaatatttttgtttttttttttaattttatttatttattttgtttgagatagagttttattttgttttttaggttggagtgtagtggtgtgatttcggtttattgtaatttttattttttgggtttaagcgatttttttgttttagtttttcgagtagttgggattataggcgtttgttattatgtttggttaatttttgtatttttagtagagacggggttttattatattggttaggttggttttaaatttttgattttgtgatttgttagtttcggttttttaaagtgttgggattataggcgtgagttattgcgttcggttaattttattttttaattaaatatttttgagatattttggttttaatgaaaatgtttttaaagtatgtttaaagcgtagtttttagtttgatggtttgaagaatggaattatttattagtggagtttaataaatatttattcgtatttatatatataaggttttttggatagagtaagagatataagatattattattttttgaaagagtatataaaataattatatagataagattaatatatatatttgaattgtggtattgaaatttaaaaaaaaaaaaagtttaaagtttttttagtaaaaaagagttgagtatttatcgatatttatatgtttatttatatattattttatgtattagtatatggtttgattatatatattagaatttatattgtaataaatagaaagtttataagttattaaaataaatagaaattttaatattttttttttgtatttttaaggattatttgtatattttttgtagtgtgtatattttattttgtaaattagtgtttttagaaaataatgtttatttatatataattaagtattaagttttgtgttatagattaaaaaaattattttagagtaaagagaaataagagtaaatttagattattagaattggtaaatgaaaggaatagtatttagaaaataatgtatatttaataaatagataaaataataggaaatatttgttttgggtttatgttaaagtttattaagaaggagatatagatataggataaaatgtatatgtagaggaaaaagaaataaaatatagaaatgtaaatattatttttttttggtaaaatgttttttagtttttggtgaggtatttttagatatttataggttatattttgttaatgattttatttaaggatgatatagtgaatgtttatttttatgtttataaaaaaagttataaaatttagttatttatatatttatttattagtgttttttgatattggaatgtttttttttattgttttatggattgattgtatttttgaaaagtttgaattatattttaaaaatttagttataagttttgtgggagatagattgtatttgttaagtttttttttgtatttttggtatttcgtatagtattaggtttatagtgaatatttaagaatgttttttcgatggttgtaatatatttgaaaattttagtattgaaaggaattttgtgataaattatttaaaaaagttaaaatgaatgaatatttagtaaattttgattttgatgaaatatagttgtttataagtggataaaattattttttaagtaaatttatggggatatttgagttgaataatttatagagatttataatttgaaagagagcgtagatatagttttatatttttttattatatagataaggaaaagttggagtttatagaaatttgaaagagtttgtttaaggttatattattatttaggagtagttattttaatatgtaataaattacgtgtgattaattttttttagaaggggttattgtaggtttttttaaagtaatagtattagataatattttataaaatttaaaaattttataatataatgttttataatgtttaagaatttataaatatttagtaaaaatattaaaaatatgtatagtaatgataaaattgattttatattggtggttatatttgggggtagtgaaaagaaaatggaaggatttagaggtattaattttattgtagttattgatttattaaaaaaattattgaaataaataggataaaatattaagatttaataaagttgggtgtttgggtaatgggggtttatttgtttttttgtgtgtttaaaatatttaataatataaatattaaaattaaaattagtaagagatttgtaaattaataggttttttaaaatattaagtagaggaataaagttaattgttatttatttaaagaattattaatagaaataggttatatatatatatatatatatatatatatatatatgttaaagggtttagttaataaagtagatattttataattagtagtatgaaggagttagagtatattttatgttgttataattaatagtaaatatttgtaatatatagaaaatatatggaataatagttatgtaattattatttaaatatagttgtgttgtttgtatttgattttaggtttatttttttttttttttattagatgtaattattagtttaaagttagtgtatattatttgttattatgttgtgagaattgtttttgtgaaatatggatatttagtttattttaatggttgtataatttattgtagaaaggtaatataattttatttatttttttatgtattgatgggtattttttgattttttattaattataagtaaatttgtaatgaatatttttatgtatatttttttgtttttgtatttgagaatgtttttaggtttttagggtatataaatatagaattgtttgtttgtaggatttttgtttttttaaatttgtataatattgtatatgtgaaataagtagttgaaataagtgggaaaattaatttttttattaagattttatgtaaatttttatttttttatatttttgttttagtacgtggtattgttaggttatttattttgagataataaagttattttatattttttttttaaagttttaaatttttatttttttatatttagttttttattttatttaaaatttatttttgtaatggtgtgaggtagagatttggttttatttattttttatggtgatagtttatgtttttgtaatattaattgatttatttaatagtttttaaaatgtgattagaggatttttggggatgttggaagggagagattttttggatttttttagagggttaataaggttaaaaatatttataaaattaagatgttatttgttttttttttatttttatttttataagtgtatagaagggttcgttaaagataataatggtatgtgatgaatagtgatgattatttttttgatatttaatagattgtgtgtttgtgtattgtattttttagagtttttaaaggtagtgagtttacggtataagtatgtagtttttagaaattattttttttttattatgtttttattagttatttttagttatatttgttataatttttgtaattttattattttttaagaaattatttttaaattttaaagtttttttttttatatagaaatataataaaaattatgtttattttgttgttttgtaataatatattttttaaaaatgtttttaattaaaaaattttatttgaatagggtggatggttggttttaaaaagggagaagagaaaatatattttttggtgtttagattgtttatgtttagagatgttgaaaaggatgatattgatatattagtaagttatttgattttttataaaaaggagaaatttattttaaagaaattgagtataattatatataataaaaatatgttgaaagtgattttttgtttagttttatagatgttaataatttattatattgtgttttgtgtagtaaaatatttttaaatatttatatggttttaataaagttgtagtattattttgggattaattatttagaatttattaaaaaaaggaattaaataatcgaaatgtagatgtaatatattttttaaaagttttttataggataagttattatattgtattggttagaggagtatatataattatagagagattaataaaggtttgaatagttgatattgttgaatatttgttggatgaaaaattattataagaatgtatagtgttggtattttttaatgatgtaataatttgttaaattaaagatttaattgtaaatataaagattgagttaatatattatttaaagaattgtattttagttttataaagggattgatttatagatggttatatattttgttttgtttttatttattaggtattagtattaattgattattgatgatttttttttatgtgaattttgggtaataggggttttgaaatattaaaagtgttatatgatttttttgaatttggtggtttatttttaataattgtgttaattgtgttaatatttgtattgatggtgtaaaaatggtggattttatttaatggtgggtaaaatgattggtgttttagtacgaattaaggtaatggtattaaattttattagtagttattgtattttttattattatatattcgtagtaaaaaaaaaaatagttttattaaaataatgtttttgatgaagttgtaaaaattattttttattaaattttaatttttaagtatatttaaaaaaattttttgtgatataatgtgatgtatttataaaatatttttattgtatgttgaaatatagttgttttttggaaaaatatttgtttgagttgtaagttgaattagttattttttttttttttttatggaaatattatttttttatttggaaaaaaaaagtgatagaaaattgattatttagatttgggaatttggtagatatttttttgaaaataaatagtgatattattattttagggaaaataattagttgtatttgttgttagtgttaaaatttaagtttttaaaagtagaagttggaattttgaaaagtttgtatttgttattgtgggatatttagaattttttttgatattagtagtaatattaatgaatataatatttttttgagatagggttttgttttgttgttaaggttggattgtagtggtatgaatagggtttattgaatgtagtttttaattttatgggtttaagtgatttttttgttttagttttttaagtagttgagattatagatgtgtattttatttttggtaaatttaaaaaaattttgtagagatggggttttgttatgttgtttaggttggttttgaatttttgggtttagatagtatttttgttttggttttttaatgtgttgggattataggtataagttattgtagttagtttgagtttttgatattgtatgaaatgtttgaatatttcgaatatttttataatttagtaaatagatattttttaatgattatataatgttatagaattttatatgagtaaaaataattttaaaatgcggataggttaatagattttaatgattttttgttgtttattttttgaattagaagatttatatttattttagatttttattttttttttaatttttttattttattatttagtatttagtgtaaattttattttttagatagtagatagtttttaagtgtatgtttttttgtttattattatttttaatgtttttatttagaattttggtaatttattttatgatgttaaattttttacgtagtataagaggttattgtttattttttttttttagttttttttattttattgtattgtttagtaagttgattttattatagtttttttttttttttttagatagagtttttttgtcgtttaggttggagtgtagtggtgtgatttttgtttattgtaatttttattttttattttgagtatttttttcgttttagttttttaggtagtcgggattataggcgtatattattgaatagggataattttttttgtttttgtagagatagtgttttgttatgttgtttaggttggtttcgaatttttgggtttaagtgatttatttgttttagttttttaaagtgttgggattatagttattgtgtttagtttattatagttttttataaaataaaaataataaaaaaatcgaatatattgatttatgattttttatttttgtatttatatgatttttttgtttggaatgtttttttttttttatttgtttgggaatttttagttatatttattaaaattttatttagatgtttttttttaggaagttttttttaatttaatttacgttattaagttattcgttttatttttttaggttattttttatttgtttttattgttgtatttattattttgtaaggtattggggttttgtagaatttttgttataaaattattttttggtttgataatatttatttatattgagtaattttataagaaataggtttgtgaaattttttattgggttttttaaaataatattgttgagagattatttaattatttagttttttttttatagggatttgttagagaaatatatttttggttttattatattagttattttttagatttgttttagaaaatagttattattaatattttttagaattggttggtggaaagtttttaattaaaatcgtggtttatttttagtaagttgtaaaattttatgatttttaattagttttagtttaaattttagttaggtatttagttttataaaaattgaagttagggatagttagtttttttatattagtagagagttgggaagtgttgatgtgtataatttgtagtttgaaatagttgttttttttaaataatagtaaaattgttgttttttgaggatggataggtggatgttatttgttgtttgtaaagtttagggaattttgtggttgagattttttttaatatatgtattttttttttttttgtaaagggattttggataattgttaatttttttaagaatataattataatttttttattgtttaaatagagttaatagtttatttatagttttattttttgtagttttagttatttatggtttgaaaatattaagatattttgagagaaagaggaagaaaaagaggtgttagttatataatttttattatagtatatcgttacgtttttattttattattagttattgtttatattttattttgtttaatttataaattttaatatgtatatgtatgggaaaaaaaatatagtatatataaggtttggtattatttgtagttttaggtatttattaaggatattagaatatattttttgtatatttaggagtaattatcgtatgatatttttttttttttgtgtaaatatatggtgttatagtttattttgtgttattgtaatagaatattatagattaataataaataatagaaatttattggtttatagttttgtaggttgagaagtttaaaattaagatgttggtatttgggaagggtttttttgttgtattattatatagaggaaggtggaagggtgatagagagagtaagaaggggttgaatttatttttttataatattattaattttattttaattattttttaaatattttatttattaatattgttattatggtaattatattttaatatgagttttgtaggggagaaatatttaaattatagtatatgggttaggtgagaaatgaagagtgaggtatataagagtatttagaattatattatatatattttagttgttttggtgtagaagtagtataaatgtagaaattgtattgttttttgataaaagggttttggaaagatgattagttatatagtttttattagaggaaatgtagattggtttgtacgattttagagtatgaaatataaagatttggagtttgttttatgtttttttaggattggtgtgattatattatggataacgaaggaaaggagttttttttgaaagaagtatttaaattagggatgggttttttatttggaggatgttagaaattacgaattaatgttttttatgtttaatggagtttttatttttatcggttttatgagattattattaatttatttgaatttaagatgagttttaaatatatttagaagaaaaaaaattaagaaatgaaattaagatttttaatgttttgaatgttcgtaatattcgagaaaaatttgagtttgggttatataattaaagtttaggatttgtgaatttaatagggttttattgttatttgtttttaagagagtgttgagaaaaattttaatttatattttaaataattaggttaaatgatttaaagaaattagtttttagaggattgaatttttaatgatttttttatttggaaaatgtgatttttaaataaaaaaagtgtttgtttattataaaattttggtttaaaggtaaatattatgttttgataagtgtaaaataagtataagtatatgtgaaaataattgttaatagtaaatgtttaagaagtgtttttgttttttaaaataaatattttttgtttttaaagtttttggattagaaaatggaaaaatataattttagttaatggggatatgtaatttgattgtagattaataattaattgttataaagattttaaaaatttttttagattaataatgtgtagaggagttttagaggattatttagtaaaataaatttaaggtaataatattaatttaagtttttttaatatttttgatttgggtaaatatttttataaattaattttgtgaattttgagtttaaaatatgttttgttttaattttattatgtgtaaaataaaaaggtaattatagtattttagtttatataaaattatgtttttatttataaaaatagattttttttggatagtttaatagttatagaaaaattgaataggaattatagagagttttcgtatgtttttttaagtttttttttttttagtttttattattagtaatattttgtattagtgtggtatatttgttaaaattggtgagttaatattgatatattattaagtttatagtttatattagggtttattttttgtgtagttttattggttgttatattttattggttttgataaaggtatgatatgtatttattattatagtattatttagaatagttttattgttttaaaaattttttgtgttttatttatttatttaattttttttatggattattggtaattattatttttttattgtttttatggttttgttttttttagattattatatagttggatttatataatatgtaatttttttagattggtttttttttagtaatatgtatttaaggtttttttattatttagagatggttttagttgttataatttgggtagagagattaggggttaatgttattggtatttagtgggtggtagagattgaggtagtttatgagtattttataatgtttaggatagttttttataaaaaagaattatttagttttaaatgttaattatgttcgaggttgagtaattttgtgttaagagtgatatgtggtatgagaaatggggcggttttggtttatgttgtgatattttagatttaggtatttttttgagtagagaggttgaaatgttgaaaattttttatttgatgattttgatgtttttttttttgattatcgtaaagaataaatggtttttttgttttggtaagaaatattgaaggtggtggtttttttttgtttgttttgaaatgaagttttgttatgttgtttaagttagttttgaatttttgaatttttggttttaagtgatttttttgatttagtttttagagtagttgggattataggtatatgttattgtattagtttttaacgtgattttttttattttatttaggtgataaatttatgttgaggtttttaatttttgttttagagttaggatattttaaatttgtaaaaaaaaaaaaaaaaaaaaaaaagttaagaaatattaattttttatgaaatattttaaatattaataaagagtttggtgagtttttttatttatttgtgttttatttgtgttttagttgtaaatatatatatatatatatagagagagagagagagttttattttgttatttaggttttagcgattttttttttttggttttttaaagtattgggattatagggatgagttattgtttttagtttagttgtttattttgtattattttaaggtagtggaggtaaaacgtttaaaattaattttttatagattaatattatattttggagtaaaataaatatatattgaaggtattttaatgtatgtttttttgaattttttttaattaataggggaaatatttttattaatttttattaaagatttttggatagtgtaaatatatttttttatttgggtaatagtttatagtatgttgttatttttttgtttatttatttatttttattatatattttttagagtaagatttaattgatggaatgttttgtggattttgttgtaattaatgtatataatagtagttagtaatagatttttgtaaatttatatttattaattatttaatatttttttttttattttgttgttgatttttattaagtagattaaattgtgtttttaaaaatagaaatttatttgtgtatggatataaaatagaatgtttttaaatgtaattttggatgtgatgttttaaattttagaaatttagttttatttattttggattaatttttttcgtttggaggttgatatattgttttatatttattaaatgtatgattataaaattaataattttgtataataatgaaattaaatatatatatatatgaattgtaaattatatagtattatttttgtgttatagttttaaaaggtatttttagatgatataaaaaatgaagagatattttttaagaatttattgatttttgatttttaattttgtgtgtggggggttgtttttttttaattttagttttatttaatttgagatttatgaataaggtatttttaagggaaagagtagtaggtataattattagttattttataagattttgtgaagtttttggtatagttttaaaaataaagtgaaagaatttaatgtatgtataaaaatagttttgtaagttaattggtttttaattttttgtttttaataaaattgaagaagaattttatatttgagttgttagttgatagattattaaaaatattatttaataatagtttattatgtgagttttgtatacgattaagaagaaattttaaaaattgggtgaagttgttttaataagtttttatttttttatttatttatattttagatttattaataataagtaatatttgttaatatgaaattgggaaaataaagtttttatttattttattaagagatgtatttttagttaaattttattattataaatttatatttttatttattaaaatgtgtattatagattgagtattttttattagaaaatttgaaatgttttaaaatttgaaattttttgagtattaatatgatgttatatgtaagtattgtatttaatataatttcgttttatatataaaattattttaaatatggtataaaattatttttaggttatgtgtataatgtatataagaaatataagtgaattttatgtttagatttgggtttcggttttaagatattttattatgtatatataaatattttaaaatttaagataatttgaaatttaatatatttttggttttaagtattttaaataaggtatatttaatttgtattgatattattttgatttttaatagttggtaattttattttaatttatataatttttttttgagatagtattttattttgttatttagggtagagtgtatgtagtggtacgattatggtttattgtagtttcgattttttgggtttaagtgatttttttattttagttttttaagtagttgagattataggtaggagttattatgtttagtaattttttttttttttttttttttgtagagatgaggtttttttatgtgtttaggttggttttgaatttttgggtttaagtaatttttttgttttagttttataaagtgttgggagtataggtgtgggttattgtatttagtttatataatttttatatttataataagaaattaaaaatttaatgtaagaatatattttgttgtaaagaagtagaataggtggtttaataaaagatttttaagaataaagaaaaaaattatattaggatgtaattagggttgagaatttaaaaaaaaaaaaaaaaaagaaaaagaaaaattttatatggggggtagaataaaaatatgaatttaaagtgggaaaaaagagtaatgtaaaatttttaattattaagaaagaggttgtttgtatattttttaaattaatgataatgggtgttaaaatattatgatatttagattgaattgaatatatgagcgattaatagttttattttaaagtgttaatatggagaatatgttggaaattatatattttttgtaattatttggatatatgttgataattttaggtttgtttaagtttatgggaggaggtatatgatattttataatttttgtaggagagatgtgaagggaagatttttgagttatttttttttttttttgtgttattttagtaggaaaatggatttataattggagaagagaagttaggtgttagtagagatatgatggagtggatattttttttagttttttattaggaagtttttttaaattgaggaggaatatattaagggagagatatattagttttgaagtttatggtatttttgaagatttattttatattttaaattattaaattttaaagttttttttagtttagtaggttgttttttaatttttagtaatttttttttatagtagaagaattaatttttttttttttttataatttgaattttttttattaatttatttgaagatgaagatattatttttttttattattagtgaaaatataatgatttgagaagagaaaatgatttgtgtgacgttagggtagaagtggaagttgtgggttttcgaataaattattagttttatatttgaagtaggataaataataaatgttaaatttaaggtagaaattagaaatatggaggaaaagaggtataaatgttttatattagatagttatattttaagaaattttttttgtagtagttatttttttataatgattaattttttttgattttaaatttattttttatgtatatttgggttagatatttttttgattatttaattatattattgtatagtattatttatatatgtatatatgtttatttaaagaattttttgtgtgtgtgtgtgtgtggtttttttttttaaatcgagtttgggatttggtttcgttttattgagttattggtgaaaaatttagtaaatttacgaagagagtttagtaagtgtaagaagagtttgtttattgtgtgtgatattttaatagatttatgtgttttatatatagggattttttggatataagggaggtattttttaggtgtttgggtgattttttggttattatttaggtttttggtttagttttttaggtttttttgaataagtagaggggatttatatttagataaggtttttggggttttgattagaggggttggatatttttggtagatttgatattgggtattgagatttttggaaaatttaagttgttaattttgtagttttttattttgattgtttttcggattgattattagttggtgggtttttattagttttttgttttattttttttgatttaagtagtagtagggatttatttgtatgtattggttttgtaggtagtgatttttaagttatattttttgtttattaggttaaatttgtttgtttgagaggtatattttttttattttttatcgtatatttgtgagttattaattttggttttagtgtgatattgttagaatgttgtgtattttatttatttagagtgggaagtttataaggtaaattgaagaggtttcgtatttttattttttttttgtttagtttttttatttatattattttaattttattttattaattagagtattaaggaagggtaggttagtaattacgtttatgatgattatagagaagtggggagatgatttatgattttttttgtgttggattttttattgaaggtatttgatggtttttgatttttttggtttgagaagaaagtttttttttatttttttttttttattttattttaggttgaggggtttaggtaattttttatgttgtatatggtataggtatttttgttttattttagaagggattaattaatagttatttatttatttatttttgaggtttagtgtttatagatttggtgtttataaatttaagttttggatttaggtttttttttttgtagttaggtgattagtgatcggtaaaaattaagattttagattttttgagtaattttattaagattgaggtaatagtttatatagttagtgtatagatagatgtaggttatatggagtttgaatttcgtatatatttggaggttttttttgggattgttgggatgtatgaaatatgggattttatttatagttgtgtttattatgtgtgatatttttatagatttatgtttttatatatagggatttttgattattttgaattgttgatttttataaaaaatgaatatatggtgattattgtatatgttgtattattgaatatatatttacgagagtttttaatatatttttatacgtttgaggagtaaaagaattttttatagattagtttttggtttttattttaaattttatttttgttttatttttggtattgggtgtagtatggttttttagtgttttaggttaaaataagtggtataggggtaaagttatttttggtggggggtgggggatttggagaaaaaaagaaaggattgtaggggagtatattgggagggttaggagaaattttggagatacggtttatttaatggaggtatatataattaagttgagaaacgatatagtatttaatagagttgggagatgtgaaatttaaatattaatttttatttgggtatagaggaaatattcgatttttaagtaggttttaggtttagaggagagagtttttggttggaagcgtcggttttgtaggatggggtgggggcgttaatgtaaatttttggtttagtagaggtagaaatagattagatttaagtagtagtttagaggtagcggatttgagggatgaagacgtgaggtttagagggtggtgtttggtagagaaaatagttgttagatattaaggttatttcgggttaaagggaataagttatatttaaaaaaaatttaatacggtgaaaataggaagaataaggatattatttggagtgtttttttgagatattttttaagaatttggattttttaataatttttttagagtagggatatttagtatatatattttttataaagtaaagtgtttgaaggtttgggtaaattttttttttttttttttttttttttttacgggtcggttcggaggaggtttagggatgagaattattgttattgttgttttttattttattttaacgagagaggaatttttagaggtttgtattttttttttattatttcgtttgagcgtttgttggaaaatataattatcgttttaaattttattttgtaattgtatttaagcgttttttttaagcgttcggggagtcgtcggaattttttttttagataggcgtttcgagatttcgtataataggtatttatttttggggttttgagtcgtagtgtttgtttttgtttaagtatttaggtttaggtatagattttttagtgtaggcggcgggaggcgcgaatacggaggatttttttaggtatattgtcgttcgggcggcgtttgatagattgtttttttgggatcggcggatatgttttgggcgttttagtttcgcgcgttttagatataggttatgattggtttggttgaacgttaattagggttcggcgtcgtggaggcgggaggaacgttgtaggtagaggtcgtttaattttttacggggttatttttcgttttttttagggtaggtaggtgttttcgagttttttagggggggttttcgcggcggtttgagatgttcggcgttaggttgtcgcgtttttgagttggttgaagtagatattgattttggagagtttgcgttttttttggttttagagtcgtggtttcgatattgcgtttttcgtttttttagttttagtttttaggtttcgttttttttcgtttggcgttggagaaatatcggaagagagagtcgtagagtgattgttgtggttttgcgatttgattgttattttttaggattttagttttggttttttttaattttttcgttttttagtgttttagagaggttggtttgcggataattatttattagtcggaagaaaaggaggtgttagtgttaggcgtagaagagggttggattagaaaagttggagaggggtaagaggggaaagagggggaagggggaaggcggaaggcggaagaagtcgggaggggtaatagttcgagttttttttttagcgtagttttttttttttcggtgtcgttttatttgttttttgttttagttttttattcgtattcgtgtatttttgcggtaggcgtgtgaaaggaatgggagggggggtttttggtcgggatatttggttttttagattttatagttttggttgagaatttatttaagtttattttaattgatttgataaatgagaattttgattagtttattggtaggtagaaatgagggacgttatttatttttgaatggaataacgcgaaatcgtaggttacgtggatgtgggaatttatagtattggttgcgtttttaaggtttttaagtttattttcgaattttatttaagattttgaaagttagattagggatatattggattattattattattttttttatttgagatagggtttcgttttgtcgtttaggttggagtgtagtggtgtgattttgttttattgtaattttcgtttttcgcgtttaagcgattttcgtgttttagtttttcgaggagttggatttataggtgcgtattattacgtttggataatttttgtatttttagtagagacggggttttattatgtttgttaggtttgtttcgaattgttgattttaagttattttttcgtttttattttttaaagtgttgggattataggtttgagtttttgcgttagttttatacgttggatttttttttagattttttttttagacgtggagcgtataaatgatgttttatcggttattttgattttgattttgggattgttagataaaattgggagaaattttatatttatttttattgtaacgtattggtttgaaattgtaggttagaatttatttatgttgagattaaaagattttttttttaagtagaatgaaatagaataaaatataattgaaaatatttgtttgtattataggtaatgagagtaattatagttttatgaaatcgttgttttagttaaatatgtttttgcgtgtgtgtatgtgtatcgggaggagatatgtattttatatatatatgtagagaggtggaaattaataataaaattttataattttttttgttttttaatagtttttgattttgagtaaaaataattttttaagaataaaattttgagttagttaacgaaagattagagttaagtagttttttattggggtttgaatagaggtttattttatttggttttttcgttttttttttattttgtggattttttttaaggtttagtaaggaattattttttttaagtttttattttttgtttggtttagttatttagttgtttttcgggttttttgattaataaaaagtttagtagagttattttattttatgtatgtgtgggaagagggtaatgttagtgatttttttttgatttgatagaaaatttataaattacgttattttttgaagatagagattttaagtttaaatattattattagagaattgaattattaagaaagatgagtggttaaaagtatagatgttttatagattaagggttattttgttaggttttgtttaaaatatttgaagtttaggggtttgaaaaattgttagaaataattatttatgataatagtttttatttattgttttttttagttttaggagtaggggagaatattttttttttttttattttgttgagaatttttttattagggttttaaggttaagaattgaaattttagtattgatattgaattaaaaagaagtaagtttttttaggaagttaaattttattatatgagatggaatgtaatattgagattatttattatttaggtatgggataggggggtttttaataatagattaaaaaaaaagttggaaggataggaatgaaataaagtaaatttttattatttatagatgatataattgtttatagagaaaaataatttaaaatataagaattaagagtttggtatagtggttggttaaatatataaataaatttattgtattttttataaaaataaaaaagtagaaatgtgattaattggtttatataataaatttatagtatagttgatttttgaataatatgggtttgaattgtgtaggtttatttatatatgatttttttttgtttttgttatttttgagatagcgagattaattttttttttttttttttttttttagtatatttattatgaagatatgaggatgaagatttttatgatgttttatttttatttaatgaatagtaaatatatttttttttttttatgattttttaaataatattttttttgtttttttgagataaggttttgttttgttgtttaggttagagtgtagtgttattatggtttattgtagttttaattttttgggtttaagcgattttttattttagttttttaagtagttgggattataggtgtacgttattttatttggttaaatttttaattttttgtagagatggggtttcgttatgttgttgaggttggtttttaattttttgttttaagtatttttgttttagttttttaaattgttggaattatagttatgggttatcgtatttggttaatatttttttttttttagtttattttattgtaagagtatagtatataatatataaaaatataaaatatatgttaaataattttatgttattggtaagatttttgattaatagtaggttattagtaaagttttggaggagttaaaaattatgtgtagatttttgattgtataggtggttagcgttattaattttcgtattgttgaagggtttattgtaattaggaataaatttttaaaaaggaaaggtatgtaagattttagtggggaaaattaaaattattaaaagaagttgaagaagtattgtatagatggagagatatatttatggttaggaagtattaatattattaaaatgttagttttttttaatgtgatttatagttttatgttatttttagaaaaattttaataaaatgttttatagaattggatataatgatattaaaatgaaacgaaggaatataagtttaagaagagttaaaatattattgaaaataaagaggaagttggggaattttttgattatatgagaagatattatatatattattggatttaagattatgtgttattattggtgagagagggagtagataattgggttaatagaatagaatggaaagagtgttaggattttttgtatgtgaagaatggttattaaagattagtgggtaaaggatgtataatttaataagtttgaatttatgatattggattagtggatatatatatattataataaattttagatgaattaagtatcgacgtattgaaggtaaaattgtaaaatttttaaatgaaaatgtgaaagaaatatttgtatgattttaaggtagaaaaatatttattaaaaagatatatatatatattttaaaaataaaaatgttaagagaagatgaataaatttgattatattaaaattagaaattttaattaaaatatattttaaaggaaaaaaagttataatttaaatttatttatattatatataatttatataggattaatatttagaatatttaagaatagttttataggaaaatgattaaaagatgtgaaagggtagtttataaaaagggatatataaaagattaataaacgtataaaagttaagtttataatagttattagagaattgtgaattagaatagtttttgaaataatattttaaaattattaaatagataaatattgaaaagtttaatattattaaaaattaatgaggatgtagggtgaggggaatttatattttgatggtggattttaaattgaaataatttatttggaaaaaaattggtattttgtagagttgaagttgagaatattttaaagtatagtagttttatttttaaatatatatgtattttagggaaattattgaataaggtattaagagtaatgtgtaggaaaagttatgagagtattttttgtaattgtaaaaagttggaaataatttagtgtttatttgtaggtaaattgatatataaattttggtataattataatgtggaattttttgtaatattaagattagtggaatatagataaaataataaatttgtataatttttaaaattatattgttgaatgaagaaaataatagaaaattatattttgatattaattatgatgttaatttgttgttagataaagataatatttattatgatgaaaagtaagataatgattaattttaaatttggaataatagttgtattttgtagagaggaagggagattttaagggaagataaatataggaaattttaatgttaagggtaacgttttatttttttatgtgattggtgggaaaaaatggatgtttaaaatttttgtagatatgtattatatgtattatttatttgtagaaaaatattttaaaaattggattataagaaaaaaggaaaaagatgtataagaaattatttgtatagagatagaagtaataaaggtaatttgatgaaatttattgagatagaagattaaaaaatgaaaaaatatggtaaatataaaaatatgatggtagaagtaatttagatatatatgtatttgtaatgtttatttatattattgtattaaatttaaatttttttgtttagtaaagatggtttgtgtgtgtgtgtgtgtatttgttatttaaaaagtgttggtggtaatggtttatatttgtaattttagtattttgggaggttaaggagggaggattatttgagtttaggagtttgagattagtttgggtaatatagcgagattttatttttataaaaataaaaaaattagttaggcgtggttgtgtatgtttgtagttttagttattgaggaaattgaggtgtaaggatcgtttgagtttggaaggttgaggttgtagtgagtcgtagtcgtatttttgtattttagtttgagcggtagattgagattttgttttaaaataaaaataaaaataaataaaaagtatttaaaataaaatgatatcgagtgattaaattaatggataatgataaatttaggtaaatgttaataaaaattaattatggatagaaatattgttttattttattttgtgttgttataatagaatatttaagattggataatttttaaagaatagagattgatttattatagttttagaggttaggaaatttaaggttgagaggtttgtattttgtaaaaattttttggttgttttatattgtggtggaaggtaaaagggataaaaagagagttgagagagagaaagagaaagagagagcgtttaagtgtaataggttgaatttataggtttttagtttttttgtaattggtattaatttatttatgaggatggagtcgttatgatttaaatattttttattattaagttttatttattaatattgttgtattgaatattatatttttaatatatgttttttggggatatatttaaattattataaatattaatattgaataaagtagaataaatgatgaagaaattttttagtgttaaagaaggatattttattatgttaaaatgtataatttattaattatttataagttataagtttttatattttaaataagtttttgaaagttagggaaaaaaatgtgttttgttaggaaggataaattgatatatttaagagtttttagtatatttttaaattaaattgttatatttaattgtaaaataatgtgaatgtaagatattttgttaaagtaaataatgattttaagttattaaatatttataaaattgtgtatttaataaatagtgaatgtatatttttttaaatataatgtattaaattataaagtaaaattaaatagaaattagaaattatacgggttatatttttttatcggtataaaatatatatatagaaaaataaaataaaattaaaataaaataaaataaaattttattaaaatagtattaataagaaagtttttatttggaaatttaaaaatattttattaatttttgggttgaaaaggaaattaaaattgtaatttaaaggagttatgtttttgttaggaatatggagggaatttagtttagaatttatttttttatatagtatagtaaagagaatgaaaaagaaaattatataagaattttatttttagtgaaattaggaaataaaaagtatggttatattttaaattgtatgttatttgtgtttaaagtaacggagagtagaattgggtataagaagttaaaatgttgttgtggtaatagatgaaagcgtggagggaattagtggtgcgggatttcggaaagggttcgaaaatattttttttttaagagtagaagttagtttaggttggagttgttggtagttggtttgagttatagtgaggtttagatgttggggaaggtagaagaaggtttatatattgggggagtagattttgttttggaggttttaaggtggtagataataaaggttttttttggaatgtagggggttttaatatcgtggtagaattttttttgaaatagattaaattttttaagttggaaaaaatatggatgtagcgtattttaagataaagtttacgtgttagtaataaaggattggtttttcggttgtaaaatttgggaggttattattgtttatgtttttttttattaatttattattttatttttatttaataggagttttttattaatatttggtttaggaatgtttaatttatttagaataagtaggaaaagaaatggtatagttttatataaatatgttatgagaaaaaaatgtttatagaaagtagtaagatttttttttagaagtaatgaagtaattttagttatgaagattatggagttaaaaggatgatttttagtagaagtagttacgagttaaagaggtttaagggtattgagggaggagttaagtggtaagggttatttttggttgggatttagggtgtttaagtgggaaaatgagtaagttagagagtgtttggtttagggattaagaaaagtatatagtaataggttggatattaaatttgaaaatgaatagtgagaaaaatgttgtggggattaggattgaaatgaagtaatagaataattaaaattatatgatttagggatagagatttgaatttataaataggtttgtgttgtttattagttataaggggagtagtgagttattgttaaaatgttaaggatttttaatgtagtttatttggaattttgtttagcgatgaaggagtttgatttgttttttttgtaatagttagaattaaagaaaaataaagtatagttggtgggagggtgagaagtaagtattatgaattacggtttaatttaaggattaaattgttgtttagttttggtagattttggattgtaaggggaataaagttgagaggttatattggtatttaggtatagtgaggtgagtttggttacgtatttaagaagtttttgtaaaatgatataggtggttattaaaaattatttttggtttttggaaaaaaagaaatagtatttttcggataagaatatttgggttttatatttattgattaggtcgagatagggtttagttggggatgggatataataaaaggtatgggtaaagaaattgggtagaggtatagtgtttgtatgttggagattaaggagggaattcggaatttatttttttatatatattataataaaggttaagtttggaggttaagtaaggatgttgtagtttatttatggttgttttttttttagagtatttatgtttcggtttatttagggggatttaaggagaggaatgtgtgtgcgtatatttatttatttatttatttatttatttatttatttatttatttatttatttattttttaatttatttaaattaattattgtgtgtatttattttaattataatggatttttattatttaattttatttagtggtatattttagtttagtttatagaaaagttgtaaagggttgtaaaaggttgtatgagaatataatttgaaaagcgttgtttaaaagagtatattatatattattgggtatttatgaagaaattagattttatattgagttagttaataaagatttataattataaatgggttgtagtatgtgattttgaatttgattatttttttttgttttttagttttagattatgatatggattatgattttttattattttttagtggaaatttatttatttttttttaagttttgttttttttaattatttagtttaaatgattagattaaatgagaaaattatatagtaaatatttggatttatttttgttataaaaggtttaaatcggtcgggtgcggtggtttatatttgtaattttagtattttgggaggttaaggcgggcggattataaggttaggagattgagattattttggttaatatagtgaaattttcgtttttattaaaaatataaaaaattagttttgcgtggtggcgggcgtttgtagttttagttattcgggaggttgaggtaggagaatggcgtgaatttaggaggcggagtttgtagttagttaagattgtgttattgtattttagtttgggttatagagtaagatttcgtttataaaaaaaaaataataagtttaaattatatagaagggtacggagtaaaaggttttttttgttttttttttttttttattttattttaggttttaaaggtaattgtgtgtagtttgtgttatattaggatattttttgtgtttttatatattttaggtatatggtaggaaaaattttgagatattaattgaggattattttttttaggtatttttttataatagaggtagataacgtatttttttttatgttatgggagatagattatagtaaaatagtaatgattaaaagattaagattttttatttaaaattttatatttgaaaattatggtaggttaggtgtgatggttatatgtttttaattatttaggaggttaaggtaggaagattgtttgagtttaggagtttaagattagttcggataatatgacgagatttagtttttataaaaaaaaaaaaaaaaaaaaaaaaagaaaagtaaagaaaaaaaaattagttgggtatggtggcgtttatttgtggttttagttatttaggaggttgaagtaggaggattgtttgggtataggaggttagggatatagtaagttatgtttaggttattgtattttagtttgggtgatagagtgagattttgttttaataaataaataaataaataaataaaatagaaaatttagtagaggttaaatgaaagaaaggtttttggagatgaaaaattttagattattagatatttgaagttagtatttgttttataaataatagatttgggaagtatttcggataattttagagttaatttttttttgtggaagtgataagaatttataggttgaagatagaaagagtgttaggaattggttttggggttttgtattttgtaatttagttaaattgtgtgatagagggttagtgttttttttaatttagatattttgggtatataaggatgggattaaagagtgtgttgtttttggtttacggaatattataaatttgaatgaaataaaaatatttttgatagtttttaaattttttttttttagtatttaatagaatggattgttatttatgttgggtaaggaaagattttgataaggaaaggaaggaattagggttttatgagagatagggttttagggatttaagtattatgatgaggtaatggttaagtttttttttgggtaatgtaaagaaaagttgatttttattgttgtgaagtaaattagaagttaattcggggtgtattcgtttggttttttttagaagtatttttgatatagggatatgaatgaaagtaatttattttggaggtgtatgaaattttagtagtagttgagtaaaagattgggaagggaaaatagttaacgaagggtgaatgattggaatttaattttttggggaaattttgggaaagtatttgttttagagttaatttagttacggaaggagggagttgggtaattgtatattaatttttattggttgaaggttgttgtttgatacgtgaatttttcggtttttttagtttgttgtgagtcgggtagagtggttttttttggttttgaggaagtttttaggaatgatgtaaatgtttagttagtgtgtattatagtggtaaggtttaaggaatatggtaggtattagtagtattagttatattaggtttatttttagttggagaatttttagatgattggagtttgtgattttttatatttgtaatatttgtgattagaatggaagaattttttattgtttttttttttttaattttgtttaagtttttataaagttttgttaaaattttgataatagttttatttttatatttttttaattaagaaggataggtttatgtttaaatataggaggatgtattagtttgttagggttattataagaaatattatagattgaatggtttaaataatataaatttattgtcgtttggttttggagtttagaaatgtgagattaaggtgttagtagggttggtttttttcgaggtttttgtttttggttggtagatggttgttttttttttgtatttttttatggattgttttttgtgtatgtatgttttaatttttttttatatggatattagttatattaggatttatttttataattttatttttatttaattatttttttaaagattttaattttaaaaaaaatttacgttttgaggtattgggtttatttaatattatgaatttatagggggatatagtttagtttaaaaagaggaaaatggggtaaagggaaaattttttttttttatttttttttttgtttttttttaaaggttaaggtgagtgagagtaatattggattatgggattttggttgttttgtaatttaagagatatttggttttaacgttagtagtgagtaatagtagagttgagaatagtggtatagaattgagttatattgagttaggttatattttttaggttaatttgtaaattagaattttagatataatttttatttatttaaattttttatttatgaattttttaaatgtattttgaaaaattatgtatatttttatatatgttttttaaatttaattttttattttgaggtaattagagagtgatatgtagttgtaagaaataatatagatagaattttttattttttaatttagtttttttgatggtaatattttataatattttagtatagtattgtaattaggatattgatatttgtgttaatgttaatattatagttaagatagtatttttgttattttaagtattttttattttgtttttttatggtcggtttattttttttttatttttattatttttttaattattggtaattatgaattttttttttatttttgtatttttgttattttaagttttttaatataaaatgttatataaatggattgtgttttttttttttttttaataaagtttattttatttatttatttattttttttgagatagagttttattttgttatttaggttggagtgtagtggtattattttagtttattgtaatttttatttttaaggttcgagtgatgtttatgagttagtttttcgagtagttgggattataagtatgtgtcgttttgtttagttaatttttgtatttttagtagagacgggttttattatgttggttagttggtttcgaatttttgattttaatgatttgtttgtttcggttttttaaagtgttgggattataggcgtgagttattacgtttagtttggattatgtttttgatgttaagtttacgaattttttgtttggttttatattttaaagatttttttttatttttttaaaattttaatagttttatattttatatttattttgtaatttattttttttgtttttttatttatttttagagatggggttttgttttgttgtttaggttggagtgaagtgacgtgattatagtttattgtagtatgtaattttttgggattggtattttttatttagtataattttttggagatttatttaggttgttgtgtgtattagttatttttttttattgttgagtattattttatggtataagtgtataatagttggtttaattatttatttgttaaaggatatttgggttatttttggttataatgagtaggtagttagataaatatttgtatataaggttttgtgtgaaggtattgtttgtgtttgtgtatttgtgtatgtaagtttttattttttggggttaaatatttaggagtatagttgttgggtaggatggtagtagtatgtttagttgttggatttttgttgttgttgttggttttgttttgtttttaagaaattgttaaattattttttagagtggttgtattattttatatttttattagaaattatgagagatttagtatttttttttttttgttagtatttagtattgtcgttttttttttttttttttgagaaagagttttatttttgttgtttaggttaggtataatggtgcgatttttgtttatcgtaatttttgtttttcgggtttaagtgatttttttgttttagtttttcgagtagttgggattataagtatgtgttattatatttggttatttttgtatttttagtagagatagggtttttttatgttggttaggttggttttaaattttcgattttaggttatttgtttattttggttttataaagtgttgggattataggtgtgagttatcgtatttagtttattgttattatttttattttagttattttgataggtgtggagcgattattttattgtggttttaatttgtatttttttaatggttaatgatgttgaataattttttatgtgttaatttgttatttttatattttttttagtgaaatattattttaagttttttgtttgttttttaattggatttttaatgtgttttttttgttgagttttgagagttttttatatattttagatattagttttttgtttaatgtatagtttgtaaatatttttttttattgtgtagtttatttttttatttatttattagatttttataaagtaatagttttatattttgatgaaatttaatttattagtttttttttttatagattatgtttttaatgttaagtttaagaatttttcgtttagatttatattttaaatattttttatttttttaaaatttaagagttttatgttttatatttattttataatttattttgtttatttattttaattaattgtatttggtaaaggttaaggtattgtatttttttgatatttttttttttttttgaaatagagttttgtttagttatttaggttagagtatagtggtgtgttatagtttatgatagtttcgaatttttgggtttaagtaatttttttgttttagtattttaagtagttgggattataggtaggagttattatattaatattattttttatttttgtgtatagatagggttttgttattttatttaggttggttttgaatttttggatttaagtaatttaatttagttggaattaaattttgtataaggcgtgagatttaggttaagttttatttttattttattattttgtttatggatgtttaattgttttattttattattgtttaatttattatttgtgaaaaaggttattttttttttattgatttttttttgtattttttttaaaaattatttgggtagattgtgtgggtttttttttacgttttttattttgttttattgatttgtgtgtttatttttttgttagtaatatatagttttgattattgtagttataaaataatatttgaaatagggtagattgatttttaatttattttattttttttttttaagaatgttttaggcgtcggcgtcgttttcgttttggagttttaggttcgttttttttcgtttgagtttggcgtcggggttattgtgttttgataatcgtttcggtattttttttcgaggtagtaggtgcggtcgttttagttttgagcgggtttcgcgtttgtttgttggtttttgttagtgtcgatttttttgttcgcggattttacgttaagtagcgattttgagtcgataggcggagtattcggtaatggcggtttttacggtttcgtaacggttttttaaggggattttgaaggataatatttttacgattttttttatggtggcgtcggtcgaatattttcgtgggagtgtttacgagtagttgagtaaaaaattttagaagtgggatgaaatgaatattttggcgatatatcgtttagtagataaagattatggtttaatgaaaatagatgaattaagtattttttattatagtacgatgggtgatgatgaagatgtatgtagtgatatagaaattattgaagttatggtaatagatagtttgttaagaatttagttgttgttgaaggtttggagttaaagtattaggtttaggaataagaaagtagtggagaggaggatagtgattttttatttgaagaacgagaaaaaaagcgataatttgaaatgagaaggacgttttattataatgaaggatttaatattaaattagttagataattaattttaaaagatttatacgatgatgataaagttgaagaaatgttagagattgtatatggagaaagtatgaatacggaagaattaaattaaggatttattgtaagtgattaatagtaaaataaattacgaagtttatagaagggatttgtttaatatttttattgtttgttagatatgaatttcgttgttataatatattgtttttcgttttttataagttatgatttaagtattaaagtgtatattagttattatatattgttaagaattaaatgaaaattttaaagattgattagattgaaaatgtttaattgatatatatatttttgtgtttagtattttattataaatacggtgtaatattattagtttaaaattgtattatttttgtaaaaatattggttaatttgtatattatatagttttttatgttttagaggttaaataatatttttggggggggggaattaatttatttttattattttaaatgtggtgatagtttttataaagtttgttgatttttttttttaattaaaagttaattgaataataggatatatatgttgataaatatttaggttgaatagtattttaatatttgtttttaatttgatttgtttgtttaattgaaaaggattgtgatttggtacggtggtttacgtttgtaattttagtattttgggaggtcgaggtaggtggattacgaggttaggagatcgagattattttgattattacggtgaaatttcgtttttattaaaaaaaatataaaaaattagttaggtatggtggcgggcgtttgtagttttagttattcgggaggttgaggagggagaatggcgtgaattcgggaggcggagtttgtagtgagtcgagattgtgttattgtattttagtttgggcgatagagcgagatttcgttttaaaaaaaaaaaaaaaaaaaaaaaaaaaaaaaaaaaaaaagaaaaggattgtaagagttattgttatattttttggtttattatttttaaaatttttgttgtatttttttgtatttataaggaaaagattgaatttttttttattaaaattagttttttttttataggttaaatttgtattaatgtttgttttttttttttaatgtttttggtattttgggtagattttagttttttaaaaaataaagattttaatgtagttattttggtattttttttaaatatttgttttaattttttatttttattttttatttttttttatatatatgtatataattttttattttttaaagaattattaagattgttatatattaggaattttttcgtttatttttttgttatttgttgtaatattgaaatttttattttgattattaatgtttattaatttttttaatatatgaagaaaatgattgagtagtagtagtattataggtgggaaatatagtttaattgttgaatttttatatttttttgatttatagtttgttaattaaattgttattaatagtttgtttggtttaattagatttaagaaaataataggttttttttttttgaggtttttttttttttttttgtatgaggagagaattgtatgtaattagtgatatgattatttttgaatgtatagatagaagtaagtttggatattgtttaatttaaaaattttagtttttgttttaagggaatatgataatgtatattatgataaatgtattttatttttttaatatagtaagaattatttggaatttttttttgaaattaagtgtaggaaagttttgtgtgttttggtttagtgatggttttatttttagttatataattgatggattgtatataatttttgttagtgttaaaataatttgttatatgaatagatttttaaaataatttttgtatattatatatgtaagaaggtttttattgaatagtttattttttatttgtaagtttatggaaatattaatatgttaaaataaaaagtgggataattttttgttgttagaagaatgtgtttattattttgattttttaaatggtatataattaaagtattgttgaattataggtgtagtattttattaaatattttagttagtaatattattgatttagaaataaaattgtttatttttgttttttgaatttagaatgttgggattatttgtttaaatatgttttagggaatatagagattaaatttgtatatatttgtgtatatatatttatgtattttttgattttggttttttcgtttttgagtttttagaaagtatttatatattttttttttagtagaagtagttgttttagagagaagaaaaggatgagattttaaatagttgattttttttgtgttttttataaatttttttgaattttaaattataagtaaattaattttttggtttttagaaagtagatgatgattttagaggagtaagatatgttaaatagcgtgttcggtaggattttaggtagttaaatgtagttgagaaaaagtatttttaagttataagttgttaattgatatgttatgaattagttaaaataggaattatatgatttatgttagatttttttttagagatggatttgaatgtttagttttagttaaggtagattttatttttaattttttaattaatattattttttgtgtttaatttttttggtgttattttgtttatttttatttgtttaaaattttgtagggatgattataatttggtataatggtataaatgaattgttaagggtaattttaagttgaagattaaagtaagatgttattttttttatgttttttattttgtttatattttttttttttaagttagtatatattatatatattataataaaatataataatatgaaaaaagaatattttagatattttagtttttttgtttttttatgtaaattttagagtaattttatttataattaataaattttgtaaagattttgattggaattgtgttaaatttgtatattggtttggggagaattgatatatttattatattgaattttttaatttatgaatagtatttttttttatatagatagagattgaatagattttttttgatatcgtttattagtattatatagtttttagtttgtaagttttgtatgttttgttagatttatatataagtgttttatgtatttgagtaattgtaaataatatatttatatttttgggttaggcgcggtggtttacgtttgtaattttagtattttgggaggttaaggtgggcggattataaggttaggagatcgagattattttggttaatacggtgaaatttcgtttttattaaaaatataaaaaattagtcgggtatggtggtaggcgtttgtagttttagttatttcggaggtaggagaatggcgtgaatttcggaggcggagtttgtggtgagtcgagatcgtgttattgtattttagtttgggcgatagagtgagatttcgttttaaaaaaaaaaaaaaaaaaagaaaaaaaaaaaatatatatatatgtattatttgtttattgtgagtatgtagaaatataattgatattggtttattttgtattttgttaatttgttgaaattatatatttagaagtttttttgtagtttttttgtgattttttatatagataattatgttatttataaatgggagttgtttattttttattttataatttgtatgtttttaatttttttttttatgtttattgtattgtttagaatttttaatattgtgaataagagtggtgagagtggatatttttgttttgtttttgattttaggtagaaattatttagttttttagaattaagtatgtttattataggatttttgtagacgatttttattaagtaaagaaagattttttttatttttatatttttgagattaaaaaaaaataatgaatgggtgttaaagtgggttaaatattttttttttattaattgatatgaataagtaaatttttttttttagtttataatatgatggattatattaattaattgtgaatatttaattagttttgtatttttgggataatttttacgtggttattgtatataattttttttatatgttggtaaattttatttgttaatattttgttaaagattgttgtattatgaggaatattagtttatagtttttttttttttttattgttattgtttggttttggtattgaggtaattttagttttataaaataaattgggaaatgttttttttgtttttattttttggaagagattaattggtgttaatttttttttaaatttttggtagaattttttattgaaattatttgtttttaaatatttttttttgtgagtttttaaattatgaatttaatttttttaataggtgtagatatttttgaattattttatatttagtgagttgtggtattttatattttttgagaaaatgatttatttaatttaagtgttaaatttatgtgtgtagaattgtttatagtatttttttgttatttttttgatgtttgtagaatttttgatgatattttattttatttttgatgttggtagtttttattttttgtcgtttttttttttgagttttgttagtggtttgttaattttattaattttttaaagagttagttttttgttttattgatttttttttgtttttgtttttttgtttttagttttattgttttgtttgttttttattttgttatttttttattagatttttgaggtgagagtttagattattggtttgagatttttttttttttttaatgtatgtagttagtgttttaaatttattttttaaatgtaaattaaaattataatgaaatgttattttacgttagttagaatggtgattattaaaatttaagaaataatagatgttgataaggttgtggagaaatagaaatgtttttatattgttgatggaatgtaaattagtttaattattgtggaagatagtgtggtaattttttaaagatttagaattagaaatattatttgatttagtaattttattattgagtatatatttaaaggaatataaattattttattataaagatatatgtatttgtatgtttattgtagtattatttataatagtaaagatatggaattaatttaattgtttattaatgatagattggataaggaaaatgtatatatgtattatggaatattatatagttataaaaaggaatgagattttgttatttgtagagatatggatgaagttggaagttattatttttattaaattaatgtaggaatagaaaattaaatattatatgtttttatttataagtgggagttgaataatgagaatataaggatatagggaggggaaaaatatatattggggtttgtttggggcgaggttggagggagggagagtattaggaaaaatagttaatgtatgtttgttttaatatttaggtgatgggttgatatgtgtagtaaattattatggtatatgtttatttatgtaataaatttgtatattttgtatatgtattttggaatttaaatttattttttataattattataattgtattttataaattttgatatggtatatttttatttttgtttagttgtgtttattgtgtgtatttttaaaaaatttttttgagattttttttttgatttatgtatttttaagtgtgttgttttgtttttaaatgtttagatatttttttgttgttgatttttggtttggttttattgtggtaggagaatattttttttatgattttatttaaaaaatttgttggttttttattgttttagatatggtttattttggtatatattttgtgggtatttaaaaaaatgttattttggttgggtgtagtggtttatgtttgtaattttagtattttgggaggttgaggtgggtggattatttgaggttaggagtttgagattagtttgattaatatggtgaaattttatttatataaaaaataaataaataaataaataaataaataaataaataaaaaattagttaggtatggtggtgtgtgtttgtaattttagttatttaggaggttgaggtaggagaattgtttgaatttgggaggtagaggttgtaatgagtcgagattgtgttattgtattttagtgtgggtaataagagtgaaattttattttaaaaaaaaaaaaaaaaaaagtgtattttgttatggaatattatgtagttataaaaataatgagattacgttttttgtagggatatggatggagttggaggttattatttttagtaaattattgtaggtatagaaaattaaatattgtatgtttttataagtgggggttaaatgatggatatatggatataaagaggaaaaatatatattggggtttattggagggtggaggttgggaggaggtagagggttaggaaaaataattaatgggtattagatttaatttttggatgatgaaataatttgtataataaatttttatgatattgtttatttatgtaatagatttgtatatgtatttttgaatttaaaataaaaggaaaaaaaagaaaaaagaaaaaggaaaatttcgtggaatttattaaaagtaacgaaaaagaaaataatgtattttttgttgttgggtggtgtgttttataaatgttgattagattttatggtttgatgttgtttatttttttatgtttttttttaatttttgtttatttgtttaattaattgttgagagaaaattattgaagtttttaattattattgttgatttgtttattttttttttagttttattagtttttgttttatataatttgtagttttgttgtttggtgtatatatatttaagattgttatgtttttttggtagatttatttttttattattatatagtgtttttatttatttttagtaattttttttgttttaagtttatttgatattaatatagtttttttttattattttttgtttgatatatgtttttttattttttaatttataaatcgtttatattattatatttgaagtgagtttattataaatagtaaataattgagtttttttttttttttttttgagacggagtttcgttttgttgtttaggttggagtgtagcggtgtgaagtggtgtgattttagtttattgtaatttttatttttcgggtttaagagatttttttgttttagtttttcgagtagttggggttataggtttgtgttattatagttggttaatttttgtatttttagtaaagatggagttttattatgttagttaggatggttattttttgattttgtgatttatttgttttggttttttaaagtgttgggattataggcgtgagttatcgtatttgatagagttatatttttaaatttattttgttaagttttgttttttaaaattgatgtatttaggcgatttatattttttataatattgttatgtttaggtttaagtttgatattttattttttgttttttgtttgttttttttgttttttatttttttgtttttttttttattgttttttaaataattttaaaattttattttaatttatttatagttgtgtgtgtgtatgtgtgtgtatttttttggatagtttttttagtggttgttttaggtattatattatatttatgtaatttatttattgttattaattattagtttgagtgatgtgtagaaattttttttttttttgtttatttttttttatttataattgtttgtaatattttttttatatatatttataattatatgatatagtattatacgtttttttttaattttataatttaaataatttaagagaagaagtaaagtttattttttaatttatatttttttttgttatgttttttttttttttttgatgttttaattgtttttaatttaattttttgtttttttagggtagatttgttagtgataaattttgttagtttttttttatttttgtatgttttaatttttttggatatttttgttgatatagtgttttaagttgatatttttttttttttttagtattggaaaaaggtggtgatttttttcgggtttatatagtttttgatgaaaattttgttttgttattttttttatttgttagatgttatttattttattgtttttaagattttttttatttttaatttttagttaattattatgattttggtgtggttttttttgggtttgttttatttggggtttatttatttttttaaattattaggtttatgttttttgttaaatttgggaagtttttaattatatttatttgataattttttttagttttattttttttttttttttattttgggattttgagtatatgaatattaaattttttgttatagttttatgggtttttgaggttttgtttattttttttagtgtatttttttttttttttttgtttagattaagtgattgttattgttgtgtttttaaggtagttaatttttttttttgttttttttttttgttgttgagtttatttattgggttttttattttggttattgtattttttagttttaaaatttttacgttttttttcgtatatattttatttttatgttgaaatattttattttttttttttttgtttttttttttttttttttttttttaaattattgaattggatattttattttttttatttttttaagtgttaattgtttattaaagtattttaataatggtggttttaaaatttttattaggttttttttttcgttttggtatttattttattgttttttaaaaatttaatttgagatatttttggtttttgatatgataaataatttttaattgaaatttggatattttaggtattatgttataaggttattggttttatttaaattgttttagttggttttttttaatatttttttagtaggtaggtaggtgagttttatgacgttaggtaggggtaggagtttaggttttttattttgtttttattgatattttagataggtttttattattattgagtggggatagaaattttggttttttattaggtgtttattaatatttttttggttggttgggagaggagtgttatttattattttttatatgatttttattgatattaagatgggatagtggagtggaggagtgagtggtaggtattagggagtggttgttggattaattttgggtggtgatgaaaattttgattttttattaggtattgtttgatattattttagaggagaggggaagagatgttttattattgttgggtgaggaatggaagtttaggtttttattgatattttaggggtttggggaaaggagtatatttttattaagagggtatgattattttgattttttatttattttttttgatattattttggtgtgtgtgtatgtgtgtgttgaagtgttgggttttttatgatagtttggtgagggtgaaagtttaggttttttatttgattttagttggtgggggtggagtcgtagttttttttgtggtgtttggttggttttattatttaagatggagtgtagtggtgcgattatagtttattgtaatttcgaatttttgggtttaagtgatttttttgttttagtttttagagtatttaggattatgatatatcgaattatgtttgattaattttattattattatttatagagatagggttttattatgttgtttagggttggttttgaatttttggttttaagcgatttttttgtttggttttttttttaaaattattttaaatgatataatagttgatagtttgaataggttttttttattttgttggaggtagagtgttagaagtgatttaataaaaaggatttgttttttgttattagatttatttattgtgttaatgagtgtgttagtggtttgtgggaagtaaatttaaatgaaaatgtatatttttaattaaatgttatgagatgttttttttaaattattggtttttgtgaattttagaaaaatattgtaagttatttgatttagttatttagtttgtattttatgtaaaaattttagaattttatttttttgaaaaatttttaatattaatagtgatattgttgttttgtagttttaaatgattttgttattttggattaatttttattgagttagttaataagtgattttttattgtttaaaaaatttttaagtgtattatagagagaaagattattgggttattaagtggttttttatatatatatttttgtttatatttaatttttgtaaaatttaaattaaggtggtaaatttagtgtggatatatatttatgtattgtattgataagattaattacgttttaaaattaaagtggaaagttttaaataaaattgttatttaattatatatgtatttttgtaaaatatatacgtaatgatgaattcgaattaataagtaaaaaaggagaggatttgtaatttaaaattgattttggaatatatattttatatttaagatagagaaaaaattttttttttttttttagtataatttgtttagttagcggtggttttttattagaatgtttttatttaatattttgataatttttagtgttttgtgttgatagtattaagtttttaaattattttaaaaataaataataataaaaaattatttgtttttgaaatatttaaagttttttataattgttattttttttatgtttatttttaaatgttttattgttattttggttattgagatattaaagttataataattgtttatttttaggtatttatgtatttaagtgattagtttttttgaaaatttttttttgttgttgtttttttttaattttatattttgaatttagaatattaatattgttaagttattttttacgtttttaaatttttgtttttttttattagatagttattatttatttggttattaggtggcgtaaaaggtttaattttttattttttttcgtttattgtgaaggaagttaaaagtaattagatgtgtttggtatgatttttatattttaaattaacgttgtattattaaaagaattatttgtgttttaaatttataatgtggtaaaagttgataaataaaaaatagtagtttaattttttagattaattttgtttaggttaaaaatattattgatatatgttttagtgattatataggttttagtaagggtaaaaggatgtttttgttcgtattttaagtttggtatggtgattgttaatatatttattttgaagaagattttgtttttgggtttagttttaaaataggttaaatagagacgataaaatgagtggaattgaattagagtatttttgaaaagttttatttggttaattttgttttttaaggttagaaattgtgtaggaaaagtgttttaaaattataaataaggtaaaattgtacgtgtttgattattttatattatatttgaatttttgtttataattttgtttgattaaaattagagtgttttagggattgtaatttgtttaagacgaattcggttagttttgtgcgattagaggttaattagtagagagttgataagggatgttggtttttttttttttttcggtaaagaagataatattaaggttatgattttattgttttttagtacgttagttattttgaatttttagtttagaaattatttttttatagagagatatagttttgttttttaaatattttttggattaaggtttttgtatttttgttggttttttttttgagtttgataaaattttgaaaagtttattaaagaaattttttttagaattagattttagagaggaaatgttggaattacggatgagaggtatatgtatgtatagggttagattacgtagagagtaggtttgatgagttatattattgttgttgttttatggtttttagacgttgttgttggttttgttgttaggatttggaggttgttgtagttattattgaagatattttttaaattatttttgttttaggaattttatttaaaaaaaaaaaaaaaaaaggaaaaaatttatcgtttttttaaaagatagttgttttttttgttatttttgttagagaaataaatatagtaaaaggtgttttgtaatttttatattttggttttttttgtggtttttttgtaattgaagttttaggtggatgaatttaattggtggaatttaggtgttttagttttaaagaaggttaggggaagtgagttttttggtttttattttagggaggtaggatttaaaaggtaggggaaattttatagtattttaaaggtgtttaaattttatgggtagttagtaaatattataggtgtgaggtgttgggtggagtggttgtcgtgaatatgtgttttggtttatggattatattagtggtttttaaagtttagtaatttatagatttatgagagataataaaatgattatttttgttttaagttattaagtttggagttggtgtgttgtttagtaatagataatggaaatatatagtatgtatttttgtaagtttggtttttttatttaatattgtttttatgagattcgtttatgttgttatatttttagtagttgatgaagttttattgtttatatagtattgtgttgtacgaatagattacgttttgtttatttatttattgttgaagaattattttgttaaataatttgagagtaatttgtggaaattatgttatttgatttttaaatattttgttatgtataatttaagaataaggatattttttttgtaaaattttaatattgttattatttttaagatatttaaaattgatattatattattaaatatataatttatattaaaaaattttttattgttttagtaatattttatagtaaatgtttgttattttaagcgggtgttatttattatatggtaataggtaattaatacggtgagtttgttttttttagtaaggatttttagggggtgcggtgatttatagtttttatttagatttttttgtgtttgtttatatgtttttattttatattttagggttcggtttattttaattaggggttttgttttattataatagttgttgttggatgatgtaataaatatttttataattttataatttttattataagttttcgggtttgatttttagttatatttgtgttgggttgtaggagaaaagatagtttttaaaattgttatagaggtatttatagttttttatttatgttttgagtttggattaaaggtttttaatttgttttttttttttttgtatgtttttgagggtagtttgacgtagttagtttttgaaggttggtataaaagtttttatcgagttatttagtttttgtttggtatttattttaatttaaaattttgttatatgttattttggcgaaaggttagtgttatattttagtgatgattcggttgttttatttggttagaatcgagtttatttttttttttaatatttttgttatattgatttggaagttttattttgagttaagtgatagttaattttatgtgttaatttggttaggttatggtttttagatatttgaatattagtttagatattgtagtgaaggtattttttagatgagatttatatttaaattaatagattttgggtaaagtagattattttttataatgtaagtggtttttttaattagttgaaggttttaggggtaaagattgaggttttttaaggaagagggaattttgtttttggattatttttagatttaagtcgtaatattagttttttttgggtttttagtttatttgtagatttcgatcgtgttagtttttatagtagtatgagttaattatttaaaataaatttttttttgttaatattttattggttttgtttttttggagaatttcgatttatataagttattttttatagaaggttgttttttcgagaaatttatttttttttatgttaatagagtttagaatttttatattttatttttttatttttgagaatataaattttgtattatatatatttatattatattatatatgaaatttttataaatattgttgggtaaagttgaatattgttgaattaattttcgatgtttttgaataagtttaatggagttaaaatatttttttttttatatggtatgtttagtgttttagagttagtagagttaagaatttggtaaggaagattaaagataatttatatattttagtttgttatataatataaaatatgtttattagattttaaaagatataaaaagaaaataatatatatgtattagtgagagaggtgtaaattaggaagagaattaaggattatttttaatttttgtttttttttttaaattttaatttttaattgaattttttaattatattttttgtttattttattgaatggaaaaaatggaaaattatttaatatttgttatggaaatataggagaaattatttttagagatatgatgttatttaagttattgatatattgttaattttagatgtaaatggtggaattaataatattttttagtttatggtatatagttattgttggtttagtgttagtttgtagttgtatttgtattttttattttttagaaatacggtttttttttgttatttaggttggagtgtagtggtgtgattatagtttatagtaagtttaaatttttgggtttaagtaatttttttgttttggttttttaagtaggtaggattataggtgtatgttattatgttagttaattaaaatgttttaaatttatttttggtaaatggggttttgttatgttgtttatagtttttagtgttatgataagttagtaattatagtgaatatttttgttttggatatttaaggttttttcgttatgtatattagtggttatagattttttggattataatttttgttaaaataggaaagttttgatttttgtttttttaattgttttttaaaaattataaatggatatattttattaaatgttttttattaatagattgagtaaaggaaatgatttttttatgaatatggtaaattatagtaataatatgttttattatattgaattattttagtattttaaggattttttatttgattttgatgtattattattagtataattattattattattgttattattatatatatttttagagatagggttttgttttgttgtataggtcgaaatgtagtggtgtaattatagtttattgtagttttaaatttttgggtttaaatgatttttttgttttagtttttttagtagttgagattataggtgtttattattatatttggttaattttttaattttttgtagagataggattttataggattttagtatgttgataatgttggttttgaatttttggttttaggcgatttttttatttcggttttttagtattattatttgtaatattgttgaattcggtttataaataattattttttttttttatttgtgtttaaggtgaaatgggtttattatttttttttttttgagttttttataatttaatttggagttaagattatattcggttgataaaattagttaattaggtttagtttttttttgttttttggaaaaagtatataatatagaagttttatgttttttgaatgtttgatagaatttatttgtgaaattatttgggtatttttaaaaatatatttttttattagatgttattgataattttaaaaattgttttaatatttattggtatagttaagttttgtatttttttttgtgttaattttgatagattaaatgtttttaggaatttgtttattttatttaggtttttaaatttattagtatatatttgtttataatattttatgttttatatttgtgttatatttgtagttgtttttttttttttattatgtatttgtttatttattttttttttttttatttataatcggttttgttgtaattttgaatattttataaatatttttaagtaagtagtttttggaattaaaagtatgttaatttttattatttagttttttgttttttatttttgttttattgttttttatttttatttttataatttttttttttcgtatttttttaggtttgtttaatttttttttttttaaatttttgagtagaatttttaggttttttattttaattttttttgttttaataaatgtatttgaaattataatattattttatatgtatattttatgtgtaatatttttaatatttggttttaaaagagttaattttttttataattgttgtttatttatttgatatagggttttattttattgttgaggttggagtgtagtgacgtaattatgttttattgtagtttttattttttggattttagcgatgtttttatttacgattgttttttaaatttatgttattgataaatatatttgtttatttataattttaagtatattttagttattaagttttaattttattatagtatggttgtagaatatagtttttttttttttttttttttttttttttttttttttaagatagtgttttattttgttgtttaggttggagggtagtggtataattttagtttattgtaatttttgttttttgggtttaagcgattttttcgtttagttttttgattagttgggattataggtgtattttatttagttaaattttttgtagagacggggttttgttatgttgtttaggttggttttaaatttttgggttttagggatttgtttattttgattttttaaaatgttgggattataggtatgagttattgtttttggtttagaatatagatagtttttaagatatcgatattttggaatttattggcgttatttttatggaatgatgtatgttttatttgagtaaatgttttgtgtggtttgaattattatatataatttttggttttttggtaatttttaaaaaatgaattttatgaattttgtattttattttatttttttttttgtttttattattttatggtttggagttaattattttttatttatttatagttggttgataaatatgtgttttgttaaatcggttttttgaagaaaaataatgtttttgatttgtagtattgttgatttttatagtataaatatttttatagtggttaatattaagttattaatagttaataattgtttttaaaaattttgaatattttgtagtttgtttttgttagttagtataagatagcgtattatttttttttttttttaagatatttacgttgtttattagtttttattagttttattttttggttttatttattttttttaattatattttttttttgatttagtgttgttttttttttttaaaaattgttttaaattatttttgtaagttgttataaattttttattggaatgaagggtattagaatagttatttggttaatatagaaaaatgaagttttttaattttttttttttttttttttttgagatggaattttttttttgtcgtttaggtggagtgtaatggcgtaattttggtttattgttatttttgtttttcgggtttaagcgattttttttgttttagtttttcgagtagttgggattataggtattatgtttagttaatttttgtattttaagtagagatgaggttttattatgttggttagattggttacgaatttttgattttaggtgaattattcgttttggttttttaaagtgttggaattataggtacgagttatcgcgtttggtcgaagttttttaattttaaaagatttaatttttatttagtttttaaagtttttgttgtgtttttaaggtatgttatacgtatgtgtagtttaggggtaatttggtatttttgagggtttagatttagaattagggaattttcgtttgtatttttagtttggagatttttttatatatttttgttcgtaggggttttttttttttatttttttggttagaaagtcggtattttttttgttaatttagggtttgtgttattacgtagtgtagttttgtatttgaggtttgacgttagggtagagttgggaggaaaaaaggggaaaatattgaaaatttattttttaggaggggttttttttttagttttgattttttttataatttatttgtttttgtttattttttggagtttttgagtatttgttttttgtatattgtttagaatttttatttgtgattagtgggaaaaatgggttatttaaaattttaaataagttaaatattatggttagaaataattttaggtatttgtaattttagatttttttttttatattttagggggatgtgattgttttagagttttgaattcgtatgtttagtttgagattttattagtatttttgttgaatatgtttgttgattgtttatttgttagtaaaatggtattgaatgttggaattgtaaattattttagaaattatttagtattattttttgatagaaaaggatatgagagtttatttttgttatttaggaagtgtaaggtaaagatagaagtagaattaaatttgttttaatatagttatttagttatttggtaatagttttttaagtgttaacgaatgtatggggttatttattgtagattttaagatgatatatggggattgagggaatgagaagttttagggagtggtagaggaagggtatataataagattgaattttagattttagttttagaatttattttgtgattttggttaagtgatttaatttttttaaatttttatgtgttttatagaagtaataataatatttatatagggttgggtgttttttttgtttgtttttttttttttttttttttttttttttttaagatagggtttttttttgttatttacgttagagtgtagtggcgtaattatagtttattgtagttttaaatttttaggtttaagcgatttttttatttagttttttaggtagttgggattataggtatgtattatcgtattcgattaatttttaaatttttttgtagagatggggtttttattatgttgtttaggttggttattaatttttgggtttaagtaattttttcgttttgattttttaaagtgttgggattataggtgtgaatatagggggttttttggtttgaattttaagagataaaatttataaaatatttagttaatgttataaatgtagttttttttggttattgttattattttttgaaatttataagtgttttaaaatatttaagtattttttatgtattgttttttaatatgaatgaatgtattatgaaaggaatttttttatatgcgagtttgttgatagttttagttaatttttatgtgtgtaggtgttttgtttatttgttagttttagttttaaaggaaagagttttattattttatttgcggttttattattatggatcgtatgatgatgcggaatgagaatttttattgtttgtattattttaaaattatttagtacgtgattatttgttatgtatagggttttttatatttttagtttagttttttttgttttttttaggaaagatgttttagatttgggataaaagaagaaagagtgtatgttgatatttaggagggaagtatttattttttttaagttttatttttttgagtatttattttttaatgattatattaggttttggttttagagagtttattataaaataagaaagagaagtttggggaaggtttatttattatagaattttggtagtttattgtttaagatgattcgatggtttatatcggtagttgtaatagtgattaggtagatgatattttcgtttgagttatttcggtttatggttagagtaatagttgtagagggttttaagttggagagagggagagagaggatggtttagttttaaaaatttttttattttttttttatttatatgtttattattatttttattttaaaatttattttttaggaaggtatatttagtggtgtgttggtaaattagtttttttataaaaaggtttttatatgtggtatttgttgatgttcgtggtgtaaatgttttcgttatgatgaattgtaagttataaatagttaagtagtttataaatttttgattatttaatagttcgtttttatgagtggttttaagttagttttagtatattttagtatattattggttttttttttttttttttttttttagatagggtttttttttgttatttaggttgtagcgtagtggtgtaattatcgtttattatagttttgattttttcggtttagatgatttttttattttagttttttgagtagttgggattataggtgtgtattattatgtttagtttatttttttttttatttttttttattgttttttgtggagatagggttttattattttgtttaggttggttttaaatttttgggtttaagtaatttttttgttttagttttttaaattgttggtattataggtgtgagttattgtgtttagtatattattggtttttatagtgattgtgtatttttatttgatttatttagaatagttttggtttattcgtattgtttaagaattttattgagttttgtatttgttttgtttttttttatttttaaaagtgtattaggttcggtattaatttaaatggttatttttgtatttttttttttgttttttataatttattttttttttatgttttaaagttttttttaggtatttttttatttggttggttatcgtttgtggtgaagcgtttgtatttttcgggagatatgtttggtttatatgttgtatttatataattatagataaaggtgttgtcggagttattaatggtaaaaggttgtcgagttagtattttttttagggttttatatatttgggaaagggatttttaggttaaagaattattaagttttttttttttattgagatattaagtggtttttgtattttgtaatgaagttttggtattttatatttttaaagtattatgtttttagaggtagtgtttttggaatttattgttagaatgatataggatttttatttttttttgtaggagagtggggaagtttagaggagagagtgttttgggagaaatttatttgattttttttacgttggttttagttagttattatgagatgtgtagataagttttttcgatatttatagttgatattttttattatatttgtagtagttaaaataagtggaggtttttttagttttattttgagggaaatattaggaataaaggttgatagaattttaagttttatttttttatattgttattattatttttgttaaacgatttttgaaaattgtaattgtaatagtttaaattgtagttttttttttatatgtataggggaattagagttttatattattaattggtaagaagtttttaattgtttatttttttgtttagttttatttatataatttttttttggttgtaaggattttgtttttatggggaaaagtagataaggttattttcgttttaacgattttgatttttcgtatggtaattgtttgatattatggtgggttataatattattttttttttgattatttatattaggatagtgatttatagtttttaaattgtgtttatatatagaatgtggtttttaaaataatcgttttatgaggtattatattatttttattttatagatgtagaaattgatagatttaagtgttagtaagagtcgaaataagatttttttattttttagtgtttagtttttggaatagtatattgtatagggatttatgtaggttgggggagttttagtgggtggggagttagaattttagagttttatatttatggagttttagttggtaggcggttatgtcggttacggtttgggtattagtagttgaattagagagtgtatagtagatgcgttcgtgtagcggggatagtttgttaaatattcggtttattatcgtttcgttgttaggagggagttaatagttattaagttaaaatttaggttttttttttttttttttttttttgagatagttttattttgttatttaggttggagtgtagtggattaattttgggtttattgtaaatttcgtttttttggtttaagtgatttttttgttttagtttttcgaatagttgggattataggtatttattattaagtttagttaatgtttgtatttttagtagagataaggttttaatatgttggttaggttggttttaaatttttgattttaaatatttgtttatttcggtattttaaagtgttgagattatagatgtgagttattgtatttaattagaatttaggaatttttgagggtgattatttaatgttttttaaatttttttgataagagaatagtatgaagtttaatgtttggattaaagtaggaggtaaataattattttagatattattaattattgtagatgttaattaaaattaggtttattttttaggtttagattttataataaagtaaaaaatgttaaggtaagaaaaatatgttttattaattttttttgttattaataattttgagagagttatgttttatggaatataatgttagtaatattgatttaattttatatatttattttgtatgtgaggaaattggttaggagtgggagaagagataaaatagtttaatatatggtaaatgagaaattaggtatttgtttgatagaattatttttttgatttttaagtatagatggaaagaagatttttaaaaatttattttttgttttttttttagattttatttttttatttatttttgtatattattgggataggttatatatatatttagattttagatttttttttataaatttagagatttaagtatttattaaatagtttattatagtggtttttggggaaggttaattttatttttttaaggttttagtttgttagtttttttatgaatgggtaaggaaagtgtgtatttgaggttattagtttttttttaaatgtatatatttttatttttatttattttgtagatattcgggaattagaatttattataacgttttcgttaaattttattgttatgatggtggtttgtagagatatagaatatggaatgttagggtaagaatagttttgatgtttttatgttagagaagaagaaatatttttagagaggcgaagtgattggtttaaagattatatagtaataggttagagttgattgttagtataggttttttttttttttatttttttattttttttattgttttattcggttgtaggggaatgttatagtttagttgtgatataatatagaaagaattgtgtttttaagttttaatttgtttagtggaattttttttattgtagagaggtggagatgaggtttttataggtagaagtgaagtagtttcgtaagtgaaaattatttttaacggaagggtttatagtatgtgtagatgtggtgtagatttaatatagagtaattgattatgattttgggaaataaggttagtttatttttttttttttggtttataattttttatttttattttttattttattagaagtgagtttttttaatttattgaatattggaaaaaatcgaggagggtagtggttagtatggttaggggtaaggtaggagagaagtagtaaggaatatatatagatggttgaaaataaaagttttagttatggaattttcgattaagaggtaaatatatattttagtagttagggaggtaaatttgtattaagagataatttgattgagaagtttaagttgatttttttaggttaagaaaagaattaagaagaagtgagggaagataaagttatatttattttattattgagttggaaggagttttaaagattttcggtttaaatgaggaaattaagttatagaaaatgtaaacgatttatgtaaagttatatagagttaatagtagatttgggattaaaatttaggtttaatttttattttttgtttttatttttattttttatttgttattgtttatttggtagtgaggggagattttttaaattataagtggttttattgtgttttttttattaggtcgtaagttattttggttttaaaggacgtttttttgagtatgtttttcgacggatcgatttattatgaatagagggttaaagaatagggttaattttaagttagaggttatttttttttaataaagtcgtttttaagttacgagtggtggtagtagtttagagtagaagttagttagttagttttggggttgttatttgttttaggcgtttattttaagtaaagtttttttagtgggtatatgggagtgggtagggaagatatagggaagggagtaaggtagtatttgggttaaggagaggtttttttgggttaagttagggaagggtattattagttaatatagaacgtttattattagtgtttgggttaagagttgtttagtggtaagtttattaaaagtttgtgtgatgagttggttttttttaataagtgtttatattttttttttttaagtgttgttttattttatttagggtattatttttttatttttttgtattatttttaatttttttttttgatttaattagtttttattgttcgggattagagtgaaagcgaaagcgttttagagtagtttttcgttgacgtttttagttaagagttaaagtattcgttttttttattagtttcgcgtgtttgttttttttacggatattttagacgattttttttagaaaagaaatattttatgtttattgcgggttgtaagcgttggttgttataggcgatttttttgcgttttcgttggtttttgtatttattttttcgcgcgcgtttttagggttttttggtcgttgtattttttttatttttttgttaatttttaagtttagatttattatttcggtgtggatttttttcgttcggggtaagttttcggttggtgttttcgttcgtagtatttttgtaaggtatcgtttttttcgtcgtttggggtattggtttttaatttgggatagcgtataacgcgtagtcgatagtttcgttttttcgcggcgtcgttaggaggcgtttgggtgttgcggggttgttttgcgcgcggcgttaacgtgtgtagggtagatttgtttcgagataagtgacgaggtagtttcgttttgaggttggggtgggaaaattggtgtaagtggaaaggtaggaggtagggagaggcgagaagggtgtgcgtgatggagaaaattgggtattagggttgttttcgagatttttagatttgatttttacgtttgttattaaaatagtttgggtaggttatttttggaagtaggcgttatttagtgagtaggcggtcgttttcgatttcgtttttttttaaatggttgagtttttcgttagcgtaggattagtttgtttttgggatttttcgagagtttcgttttcgtttttttttttagtcgttagtaggggaggattcggcggtattcggagttttaggttttatcggggcgcggagagttttaggttcggtcgggatcgggacggcgttcgagtgttaatggttagttttaggtgtttcgtttttcgcgggtgtcgttgttttttcggagtttttttcgtatggttggggatagtattgttatttttcgtcgattgggtgttgtttcggatcgcgttgtttcgtatattttttttgttggtgtttatcgcgttgttattgtttcgggtttgggcggtgggtttgagtcgttgggtcgtgttttggttgggggtttgcggggtttttagggtaacggttggttttaagagcgaaaacgtaggtgtttagggttggttggttgttttgaagttattagttgcggtattgggtttggttttgtcgggatttgttttgtttcgagagttgattttatggggagttttcgggttcgcggatagtattaggttattgtattggggaagttattttatcgttttcgttgttagttatgtagcggtattgttcgtagtagttttgtggtataaattcgggagtttttgggtgttcggcggttagggcggttttggaaattttgtgcgtcggtttttaggttgtttgggttcggagacgcgtcgtttttcgttgtttttggttttggtggttttttttttttttggtaaggggaacgtagggtaagaggggaggatataaggggattgggataggaattaaaggtaattgttagtaaggtagagtagcgtgggttttgggaaatgtggagcgggagaaggatttttagcgtgggttttggaatattatttcggtgtagaagaaacggtattggattggcgggggttagaggttttgggttttattgttgatcgggttttgattttttgggttacgtcggaagcggggaaattttttgttttggggtcgaagggcggggtatttttatttttaataggaggtttttttattttatgatttttagtttttttaataaaattttgaaagttttggtagagtaattatagggtagtgagttttagggtagtttatttaggttcgggattgagacgttagtgttttttttttgttgatgttttttaggataatggtgagggggaggaggcgtggtggggttagtttgattggaattgatttatttagatttaatatttgtgcgtgattttttttttttttttttaggggagatggttattttattttttacgggtcgttttattgattggattttataagatggtttagtcgatatttttattcgaaatttaatttttatgtttatttttattatagttaggtttgggggttgaaaatggggtattttgtaaatgagggagttggaagttggggttgttgttcgaaatgtatttatatggggatatttgggatttttagtttgttttttgaatatattttgatttttttttttttcgggttttttatagtgtagtgttggagttcgtgggtgacgggatttataataatattatgggttacgtgtatagttatttgtagggagaggtgtttggggttgttttgcgttaggagacggagtttttttaatagaattagataggttttttttgaaatttttttattatacgttatgtattgtttatatttttatatatttgttttgatttttttttttttcgtttttttttttttatatatatatatatatattgtttttttttatttttgatatattttttttttgtttttttttttttgtttttgttttttttttttttttttttatatatatatatatataattgttttttttatttttgatatattttaggagtaaaatattgttttttttattttaagaaaaatttagagtttttatttagtatttttttataaatttatttttatgtatttttagatagaaattatagaattttaaatttggaaattttgagtttatagagattaattgttttatttgatagagaaggaaattgaggttaagattttaaatgttgaaattgtatagttatatatggttagagatatatttggggttagaattttggttttttgagtgttttatagatttcggtatgttttttagtagtattagaagttgtatagttatatatggttagagatagatttggggttagaattttagttttagtgagtgttttatagattttggtatgttttttagtagtattttttttttttatttttgttatgtgattagtttaagttttttttgtttgtgtgtatagtatgggatatataggttttttagggaatagaaagtttttaggaaaatggaaatttatatgtgtattaatgattttataattaaaatgaaggttaggttttttttttttaatatttattttttttgtattgagatttgtagatttttggagaattttaattttgttttttgtagtttttttagaattttatgttgatatttttgattttggtattttggtttattgttagttcgttttattatttggaatttgtttgatttattttatttttttttttttaattttgtaggtaatattatgtttcgggtaatagaggatacgtttattttgagtgattttttgagtgagaatttgagtttatttttgtggtatttggtgcgaggtttatgttttttggggattatgttttggggattagtgttttttattatggttattttgattattttgtttttgtttttttttttgtttaagaaggtgggaaaatggtattaggtatgtttatggagttggttcgttttatatagatttttattttttagatttggtagatttagttttttttatattgtttttagtttagtttttttggtatttttattgattttttatttttatggaatattttgtttttgtggtttatgtttttaggttgtttaatattaatttttatattttttgggtttttttttttagtttttttttataatttgtttttaagaatttgatttttaattcgttttgagttatttttttttttttcgtatttttttagtatttaaggggtatagttgtgtttttttttttttttttttttttttttgtttttttttatttttaatttttaaataggtaatttaggtattagtgtttttgatggtttgttaattcgtgtgatattttttgtttatgtatttatagttgttggaagtgtaggtgcgggaatttttggtaaagtttagttaggtggttattgaggttttgtcggttatgtttatagttcgaagttttgttaacgaggagggcgaagtttagaagtttagggaaaagttgtaagaaataaagatatttaattagaaggaggttgtggtttatgtagttaatttttggattattagtgtgagtatttgaagatgaatatttatttttttgtttttaagatgtcgtgattttatttttatttttatgattttgtttttattttttttttattgggaaatggttggtttagtattttcgttttagtaatttgaggtttaatgattttatttagtgtttttagttttttttttttttttaaagatgttaggtggtttttttttagtatggtatataaaatttatttaattatgtggattggagagatgcgtgttttttagttttagggtttttttttgttttttaggggaagtgtagggcgttataaatttttgtatttgggattgttttatgttggtattttgtagatttgttagtgagagtgatgggaatagtggaagttagggatgagggatatttgtgatgtattggaaagagagttacgttagtgattcgaagattttggtttgatgatgtaatttatttgttttgtgattatgataataaatttattttttttgagattgttttttttttatttatttatttgtttgtttgtttgtttatttttatttattattattatttttgagttggagtttcgttttgtcgtttaggttggagtgtagtggcgcgatttgggtttattgtaagtttcgtttttcgggtttacgtcgttttttcgttttagttttttgagtagttgggattataggtattcgttattacgttcggttaattttttttttttttttgtatttttagtagagacgaggttttttcgtgttagttaggatggttttaattttttgattttgtgattcgtttatttcggttttttaaagtgttggaattgtaggtatgagttattgcgttcgattggttgtttttttattttttaaaaatggagtgatataattttttttataaggttttttatgtattagttgatattatatgaatgaaagttttttgtgaagagtaaaatgttttttagataaggtgatagtggtgatggtggtgaagataattgtgatttgtatgatgtgtattgagttagattttatggggtttttggtttatttttttgtttgtttattgagtttgtcgatgttatttaggagatagggatttgatattttttttaggttaatgattgtggttttttgtgttttttttagatttttttattttagtttttttttttgtggtttttttatagattttaggtatgttgttgaaagtgggaattttttatattggtgggtagttggtgattagtggggttgtaagtagtgggaattttgttatatttgttttttattagatgtagtttatttaggttgtggaggtgaggtttttttatttttattttttagtgtgatttttttttttggtttagtattatttgtgtgatgtttttttattttttattttttttgttttatataatgttggtaagtagattattttatttttattatttttatttttttttaggtattgttttttatttattttagagtatagaaggttgtgggttttttagagaaaatatttgagtatttggatcgtatttttcgttgtttatttagtggtttgttgatttttttatatttggagggttttgtttagttttaagatgttttttttgtttatttaaatcgtttagatgttttagtgttataggtataatttattattttttgtattttattggttttaattgtaattttgttattttaaattttttttttgtttttagtttgtttattgttaagtatatattttttttaattttttaaaggtaatggtaggtattatttgttttataaattttttttaaatttaagaatttagtttgggtttttaaagagaatgagagaagaggtttcgaagagagtgtttttacgttttaaggaattgttgtagtaaaatttgtgttttcggttttttattttttttttttttttgtaatttggaatgtgattttttttttttttggtggtatttgatattaagtgtgtggtatagtggtgttgggtttttgtttttgtttttgtcgttttttttatttttattttttggggaggtattatttagaaatttgtgtatgtgggagggtaggagtttttatatttttttgttttttttttggggtaagatattatgttatgtaataaggtaatgatatttttaaggttagaggttttggtagttttttatcgtgtgtttttttggtttttaggggttgatatttattttacgttttggcgaggtgacggcgttggtgggatttaatgggtttgggaagagtatagtggttgttttgttgtagaatttgtattagtttatcgggggatagttgttgttggatgggaagttttttttttaatatgagtatcgttatttgtataggtaggtatggaagtaggtggtttgaaggagggtagggagtattaaatacgaagagtatttttattgagtattttgaaagaggggttagggaatgataagagattttgggtggagatggtggtgtagttaggagggaggtagtatgattttgtgatatgtttttaataaagattttgagttttcgatttttagataattatatttttatgtgttttgttttatgattttttattatattttattttaggtggttgtagtgggataagagttataggtatttggaagaagtttttaagaaaatattgtttatggtttgatttagaagttaattatggaggaaattatagttgttgtagtaaagtttggggtttatagttttatttttggatttttttagggttatgatataggtattttttttatttattttattatttagttatttttatttttgttgaaattttagtagttttgtttttattttttagtttttttttatttatggatattaatttgaagttgtaagattatgtttttatggtttttttattttgatatttttaggattttgtttatttttttagaattttttttatttagttataatcgttagattttggtgtgtgtgagtgcgtgaatgtatgagtgtgtttgtgtgtatgtatatgcgtgtatatatgtggttatatcgtttttattttggttttttgttttgtagaggtagacgaggttgggagttagttgttagggggttagcgataggtagtggcgttggttcgagtattgattcggaaatcgtgtgtatttattttggatgatgttattagtgttttggatgtaaatagttagttataggtgaggtagttatttttttaatggttatattttatttaattttgttttttttatatattttttgttagttttattaatattataattatataaattagtttttgtagtttttagtttttaaatttagttttattggatgtttttttaaggagtagagatagaagacgaggtaaagatatttagaattagttaaaagagattatttataaattatagattgaatttttttttttttttttttttttttttttaagatagtgttttatttagttgtttaggttggagcgtagtggtataattttggtttattgtagttttaatttgttgggtttaagcgattttttttttagtttttcgagtagttgggattataggtgtatattattatgtttggttgatttttatatttttagtagagatgggttttattatgttgtttaggttggttttgaatttttgagtttaggtaatttgttttttttagttttttaaagggttggggttataggtgtgagttattgcgtttagttttatagattgaatttttaaagcgaaatataaggaaaagattatttttataatatcgtttatttaaaaaaattattttttgtatagatagcgtttcgttatgttgtttaggttggttttgaatttttgggtttaagtgattttttttttttgattttttaaagtgttaggattataggtatgagttatcgggtttagtttattttaattatattaatattaattaagttagtttgtttatatgtattgttatttatttatttattaggaatttttttgagttaggtatttattattattttatagatgataaaatggaggttaaaagaggttgaataagttgtttatatagaggttatatagtttttgagtggcgtagttttgatttaaatttaggtttgtttgatttgaatgtttatttttttattattaagttatatttttttaaaatcgaatataaaaatgttaagtttatgggtagagaagaggattatttaatagtttttatttttttgttacgtgttttattttagggtttttatttttattttatttttgtattttttatgtaaaatagtttttaatgaaataaagggtttgcggagaagtatttagaatgggaaacgttggtgtttttggggttgttagtagagttagtagtgattttgtgaggttagttttagttttggaaatataggtgtttttttgggttgagggtagttttcggttttgacggttcgatgtttttttttaggtggagtagtttttgtacgaaagttttgagcggtattttcgtttagtgttttttattatttagtattttagtttggtggagtaggttgattatattttttttttggaaggaggcgttattcgggaggggggaatttattagtagtttatggagaaaaaggggtgttattgggttatggtgtaggtttttgtagatgttttagaatgaaagtttttttagatttgcgtattttatttttttttttttttttttttttgtggtggagaattatagttgtagagtaggtagttgtttttaggatgagttatttgaaatttgttttgagtgtgttattttttttttaagtttttcgtgataatgtagattttttggagtataaatataggatttgtaattttttattgtaacggagtttagagttagggttgatgttttggtgtggttagtattttgaaattgagaaatgtttagaatgtacggaaagatgattagttatttttaatataattgaaggtatatgttggtttataaatattttgtaggtttttgatatttataataaaattggtgttttgtattgtggttttttatgttttcggtatattaaacggtttattgttttttgtagcgtattttttagttgcggatgtttttttttttattatttttaatgttttattttttaattgtattatttttttttttaagttttttaatttttatgaggttttttttattttttttatttttttaggtttatttttaagaatgtgtaagattttagttatagggtttattagggtattagcggtcgtagtttagagtcgtggttttttcgaagtggtagatggggcgggcgcggttagagtaagtgttaggcgggaatagagggattgggcgcgttttataatttattatttcgttcgttggttttttttggttcgtttggttttgaagttgtatttggaggggaaattttagaatagtaggcgggattgtttagtaaatattttttatttagggaggtttaggtcgtgtgacgtcgatagttgttgggtagatgaggttaatataggttgtaagaagaggcggggtttagaggcgtgaaatttcgtagtgtttagttaagtagggagtaacgttaggaagggcgggtagaaagggtacgtttttgtgggtgattataggttaggagatcgttgaatttggaggggttttaggatggatttcgtggaaagatttagagattgcgttttttttttggcgtcgtttttttttatacgcggcgggtatattttgttgtagttggtttaggatttgtttttaagattttgttttttcgtattttcgttttttttggttttgtaaagtgatgtttataggaatttttatttcgcgtgatattatttttagtttttggttgatttttagttttttggttgaagttgcgtttttagatgatacgattttatttatttttgtttttagcggatgttcgggtttggaggtattttttattgtaatttatcgttaagtgggtttttgaaggcgtttgtttttttttcgtttttttcggaagatttttgatttattattttttcgatttttataacgggagagtagagaagtcggtttttagtgtgatggttttggtttaggtattaattgtttttttttcggaaaaggtagggggatgtggaaaagagttttgttttttttttttcgatttgtggttttcgtttttattttttttttcgagagcggatagatttttgggtgttgggcggttatggcgttattagatgtatgcggagtttttcgagggtagcggtcggaatcggttttttcggttgcgggaagcgggcgtcgttcggatttaggatattatagtttttttatgcgatttttagagttcgttttatttcggggaatgtaggtcggggtagtagggaagtttttagggatgtagggaggcgggcgttgaggagtggagggtcgtttgagaggaggaggcgagagcgggagcgcggggtatagggtcgggggtagtttttagtttcggagagcgttagatttaaagaagaggttatatggggatggggtttgagaggaggaagtgtaagttaggataaagagttataggtgaggtgggggtttttaaaggaagataagagaatttttttgtttttgtttatatataaatggtggagttttttttatggggttattatatgatataggaggtgtgtggtgttttgggaaatttatgaaatttgtttgttggtttttttttagtaatttattgttgcgcgatttagaataagttatttagtttaggttttaagttttttttttgtaaagtgaggatattgttattaaacgtgttttgtgagggttgaatgttttatgtatggaagaaattttttaagttatttttaaaattttttagtaatggtaatatgtgtttgtttttatttttgttgtgttggaaaatggaaaaggttgatattggtatgttttttttttttttttttttaagttatttttttttagagattggttattaattgttttatttattgatggttagattatttttgtatatttttttatttttatattttttaaaatttttttttggagttttttattatagaattttttattgttttttttaatttttttttttttattagtttatagaatttttttagtttttgggtggggacggagaaaggaacgtttagattgagatggtttatggtattattacgttcgtttttaagttttagtatggagtgattgtagtagtggattttcgggttttagttgggttttatattagtgagtgtatacgttttagtaggtagaatttggggagttgggtttttttttttataggaggttaattttgtaataaagtggaagtggatattgatttaggatatattgggggatttatggggttatttttttttttttaaagttttatttttttttaggtgttttacgggtgaataaggtgattgagattaatttttatttgtttggtattatgtttggttgtgtagtagattgttagtattgggagcgtttgttggttaaggaatgtaggtaagcgaggttttttattttttttttttagtttagtggttaatttttggattttttagattattgttttttatttttgttttatgtggtttattttagtgttaatagtatattttataaaatagttttttggtgataagattttttttttaaattttagtttgtgttttatttataagttagatagtacgttaggtatttagtattgatatatttattttggcgggatagtattatttattaggttgtttttgtatgttttagatattttaaattttaaatttttttttgatttttagattttataaaataatttttttttaatgtttatttttttaattattttttgttttattaagttggaaagagttaatttttttttttttattttattttgtttttatttaggttgtattatttgcgaaatggagaacgtattttagtgtcggtagtttttaagttgttgtttaatatgatgtgttagtatcggggtatgggtttttttatgggtagtatgatttgtggttgggataagaaggtgggtgttttttattttttatgtttttttattatgttttttatggatgatagatttgttttttattatatatttttattttttttttgataagatgtatggtatatagagtgtttggttatagaattgttttagtatatttatggattatttattggtttagatatgaattattgtatgtgttttgtaagtttgttttttttgttaaatagttgattttaagtttgtttttttttttttatttttaaagttcgatgattttattaaagtggttttttaattttaatgtttttgtggtaatattaatttttttgtttattttttatgttttatatttgaatttttatgttattaatatttttttttttaattttagtttgaaattttttattttatagggttttggattttattacgtggatgaatatgggattcggtttttaggaaatatgttttttacgggtagtgggaatatttatgtttacggggttatggatagtggttatcggtttaattttagttttgaagaggtttatgattttggtcgtagggttattgtttatgttatttatagagatagttattttggaggcgttgttaatagtaagagattaatgtttttattattatgtttgggaggagtcggcgggtggtggggggggtgatttaagattgagaaattagtttggttaatatggcgaaatttcgtttttattaaaattataaaaattagtcggacgtggtgacgggtgtttgtagttttagttatttgggaggttgaggtaggagaattatttgaatttgggaggtggagtttgtagtgagttaagatggcgttattgtattttagtttgggttatagagtgagatttttttttaaaagaaaaaaaagaaaatgattgagagatttaaaggagggagagtagtagggaggaaatttttagagttagaagaagggtattaaaggtttagttatatggttttaagtttgcgtatgtgttttgttgttgtttttaatataatattagtgataggaatttgttgaggtgaaaggtgattttatgttttttttttatttgtttatagtgtattatatgaaggaagatggttgggtgaaagtagaaagtatagatgttagtgatttgttgtattagtatcgggaagttaattaataatggtggtggtggtagttgggtaggttttttttgggaggttttggtcgatttagggatttaagttacgttaagtttaaggagaagaagaggtttagtttgagttaaagagagagtacgggtttagtagttagaggaggtcggtgaagtgtattttttgcgtgttttttatttgaataagtattttttttagggaagtttttgggtgttttattaagtagaataaagaaaaacggttataaatatttttgttttgtggttgaatggggttgggtttgtggttgttgggtggggtagaaagtaaagagacgttttttttggagaaggggtttagatttttatttaagaaatgtggttttattatatagttttttttggggtttttttttatatttatttttttaagattttaggaaggttgtttattgttgtttatggatatttgtttgtaattttatataggttagggttttttttatagagaggtatttggggatttttgtgtgttttattgttaatggtttgaggaatagggagtagggtatttaggataattgtttttgattttatagagtaggatgaaaaagtttttattttattttaatatggtaattatataaatattatattatttattttaaataatattttggagatattggatattgaatataaagatagatattaagggtttaattttatgatgtgttatgttgaattgtaagatggtaggattataattttagaggaagaagagattaggaggatttttttaagtgaggagtgtggggaaaatgtaaaagatttaggttagaagaaagagatatatattatgagattttcggaattatgttggaattatggattatgttattttttagaaaataaaggaaataaatgtttgaaagtaggagtatgagtttgagtatggagttttttttattagagagagatttttaaaatgttagaatgaatagagttgtaaaattttagcgagtttttatttaaaattttttttttttattattattattttaaattttaagtgattttttggtagttatataggtaatattttaaaatggtgatttggaatttaagcgattttttttttggggaatttgtttgtttgtttgtttttagtttgggaggtggttttaatttgaagagttttttttggaataaacgaatttttttgttgtataggaaggttttgggttaggaaggatatttaaaaatttaattattgttttaaatagtgttaaaatagaataagaattaaagtttagtacggggtattttttttataggttgaaggtgcgtttaatataatttggagtatagatttagaggtatttgaatacgcgttagtttaaggtgtttcggttgagaaggacggatgaagatgaacgtttagggtttattaaatttaaagtttgtacgtgaaaattttttttggtttggtgagattggttggaattttttatttaggagagttcggttcgttcgtttaaaattggagtttgtatggaagagggtatttttttttttttagacgaagttttatttttgtcgtttaggttggagtgtaatgattcgatttcggtttattgaaatttttgttttttgagtttaagcgatttttttgttttagtttttcgagtagttgggattataggcgttcgttattacgttttggttaatttttgtatttttagtagagatagggttttattatgttggttaggttggtttcgaatttttgattttaggcgattcgttcgtttcggttttttaaagtgttgtgattataggcgtgagttatcgcgtcggattagaaagaaggtattttttaatagtaggtttagagtttgaagtagtaattttgagaaaatttagtgattttttaattataaagtattttttaattataaagtaaggataatagataaagttgtttttgagataattgtattttatttaatgataaagaaatatttttgtagttttatattttagagtaatcgttattaaaggcgagtgagatttattgtaggtttgtatagtgcgaattagagttcgggttttagtttcgttgtttgcgggtttcgcgcgttttttttcggcggtttagtttagaatgaaggttttggttggggaagcgaaagcgaaagttgttcgagttttgacgttcgttttggtcgagcgtagttggcggattagagtcggtagcgaggttgggagagacggagcggattttagcgttgaagtagaagttttcggagttgcggttttttcgtcgcggttggtgagttggtgcggaggggaatttggagcgttaatagggacgtagtttaagtgattatttattttacgtttttgttttttagtttttttgtattcggcgataggagggagcggagttcggattatttagttcgtcgcggtaggcgggggtgggggtgggggttcggggattttttttttttttttttttaagtacgaggtttttgatggttatgtttttagttttttagaaggtcgaaagttgtttgtcgtaggaggggtgtacggatgagtatcggttatttaggagagtttttagggttgaataggataaaatgagaagtcgatggacgggttaggcggagtcgggcgggtaggagggtagggataaggattgggattttatttttatgattttttatttcgtattcgttgatagagttatgcggttttttgatttgagattttggatttttttgttgttggtggacgcggttttattgtggttgttttagggttttttggggattttgtttttttaagggttgttaggattatggttggaggggattttgcggttgggagggttgtgggggttgttaaagttaagagggttgttgggatttgtggggatattgttgttttcgttttgtttggttatttttttgattgtttttttgagagttttggtcgcgggggttttacgtgtttttttagttagagtcgttttagttttttggagttggttgttggtggggtacggggttgcggggtttagttggttattgtgggttgttttgagtttttttggagtttaggagaaggagtaggattaggtgaataataaagttttgatgtggaggttgttgaagttttttaggtcggatttgttttttttcgttgtcgttttttttttttttgtttttgttgttttgggtgagttaggagaggacgttgtgagttggaggtggtaaaagggtttgggtattagtatatttttgtgttattttttatgttttttttaggtgagatattaattttttattattttggtcgtgtgattgatattttgggaggtgattttgatttttatgtttttgttagtgttattttttttatgtgtttttttttttttggtaggtaggtggtgggtagttgggtttatttgttagttttaaatttttataggggtttttatttttttaattttatttttaggtttttttaggcgtaaaatataaaaatatttaaattaaaatatggtgaatgtagttattattttgttttatttatttatttattttttttttcgtttatatttatttaatatttttaaagtttatttgattttattataggaataagttatgagtgaaggtagtataaaaggaatttaagttttagatggaatgttttttagttgttttttaatatttttaggtttatgaaattttatttttttttgttttttattttttatttttaagtttgtttttaaagtatttttttagggttatttttttaggatgggtatgttttttttttttattttttttttttagtttattttgttaatttttgaagattttattttgaggtttattatttttttttttagaattattatttttttttttttatttgtttttttttttttttttagatatatttaaataaataaattgtttgataaggttgggattgggatgaggtgagcgaggtatttggggtgtaaagtttaaggaggtgtgtatttattttatttaaattttagtcggtttgattgtttttatttttatggttatatttaatttagagtattttcgaaaattattttattgtgtttttattttattttggttgttttttgttgaaattatagtcgtgtattgtataacgatgtttaggttaatgatgggttatatataagatggtggatttataagattataatattatatttttattgtattttttttatgtttagatatataaatatttatttttgtgttatagtcgtttatagtgttaggtgtagttatatgttgtatagatttgtagtttaggagtaataggttaaattatatggtttaggtgtgtagtaggttatgatatttaggtttgtgtaagtatattttatgatgtttatataacgatgaaattatttaacgatatattttttagaatatatttttgttattaaagtataaatttttattatattatgtttgattattttaaacgtttttttaatatggtaattaaatttgtattagaaatatatattttgtaaaatatatgtttttatgttttatatttttttttttaagtgttattgtagtatgtagttggtttaagagggattttttaattcgaaggatgatagatgggaattatatgattttggggttttagagaattgtgggggtagggaatttattattgtagtttttatgatgaagtatttatgatgatagagaagggttttgggtatggggtaggaaggagattaaggcggaggagacgtatagagggataagtttgagggacgttgggatagaagtaagtattgggatatttgtttttataatatttttttttttttattgtagttttttattgtgtttagtatagagtgtattttataaatatttgtaaatttgtatatgttatgattttgtttttatatttagtttattatgtttttttttttttttttttttgtgtattttttattttttttttttttgtgtgtttgttttttattttttttttttttgttttttttggtatgtttttttttgattttgcgtttttttgtatttttggtttgtttttttgttttattcgttggtttgttttttttttgtatttttttttttttttatttttttattttatagtttattgtttgtaggttgtcgaggaggttgttttatttatattatgtttcgaattaatttgcggattcgggagtagttttttttttttttgttgcgttaggatttcggttttttttaggagattaagataggtggggtttggagtttaggtttgagatttttatggatattttttgttttttagtgattttttatttatagtttttttttttgtttttattcgtatgttaggatttggggatgttttttttttgtttgggatagggtggagaagtagtttttattgtttttttgtaagtgaaggaggatgtttagaggagggggttgtgttagagggaacggttaggagggagtttttgggggttttgtagtatatatggttttttttttttttatttgttttgttttttttaggggagttgaatttacggttgagttcggatattattttgatgagtaattggttttttttaaatgttaatgtgtttttgcgaagtttggtgaaagtggtggggttgtatggttttatgtttagtatatcgtttcgatttatttttttttttttgttgtatatgttttttataatagtagcggagaaggtgtataatattcgttattaggtgagcgtgtatgtaagggaattttaaagggagaataaaattgataggtgaggaggtttttatatttgtggttagaggattttttagagagagatgttttttttttagttattaggggagaaggtatattgtagtatatattatattttgtttgtttagttatttaataatggatatttgattttagaagatttatgattttttagaattgtaaataaaaatgtaaagtgtatgtgaaggtatgggggagggaataggaaggggagatgataggcgatgataattttttattagttttttaaaggagtttgtatatttttcgtttttattgcgaagattaaaaatggttttttagaggtttttaggtagggagattttttttttaaaattagtagaagaagtttggatgtagtatagggaaaggaggcgttattaggaagttttaagtttgaatgttagttttatttttttttttttttttatattgtggtaaaatatatataatataaaatttattattttaattatttgaagtgtatagtttagtgatatttaggaaatttatattgttattgggtagttattattattatttatttttagaattttttttatttttttaaaatgaaattttgtatttattaaatagtaattgtttattatttttaatttttggtcgttggtaatttttattgtattttttgtttttatgaattgtgatgattttcggtgcggtacgtaagtggaattatatagtatttgtttttttgtgattggtatattttatttagcgtaatgtttttaggttttatttatattgtagtatgtgttagaatttttttttttttaaggttgaataatattttgttgtgtgtatatattatattttgattatttatttatttgttaatggatatttgcgttgtttttattttttggttgttgtgaattatgttgttgtggatatgagtgtatatttgtttgaaattttgtttttggtttttttgggtatatatttagaagtggagttgttggattatatggtaattttatttaataatttttgaggaattatgtattagtttatttttacgttgttgataaagatatatttaagattgggtaatttataaaagaaagaggtttattggatttatagttttatgtggttgggaagattttaaattatggcggaaggtgaaagatatattttatatggtagtagataagagaaaagatagtttgtgtaggggaatttttttttttaaaattattatatttcgtgagatttatttaatattataagaatagtatgggaaagatttgtttttatgatttaattattttttatttagttttttttataatatatgggaatttaagattagatatgggtagggatatagttagatcgtattaaattattatatagttttttatagcggtagtattattttaaatttttattagtagtgtataaggtttttaatttttttatatttttattaatattattttttgttgtttttttttttaatagttattttaatggtgattaggtgattaggattattttattgtggttttgatttgtatttttttaatgattagtaaatattgagtattttttcgtgtgattttggttatttatgttttttttttgaaagaatgtttgtaagttttttgtttattttttgatttttttttaagttgtgggagtttattatatgttttgtttattaattttttattagatatatgatttataaatatttttttgtattttatggttgtttttttattttgttgttagagttttttgatgtataaacgttttaaattttgatgaagtttgatttatttattttttgttgtttgtgcgtttggtgttatatttaagaaattattgttaaatttagtggtatgaggttttttttttatatttttttaggagttttatagtgttagtttttatgtttaggtttttgatttatttggaattatatttttattttttttaattatttgtggttttttgggaaaattattttttttttttgatttagatattggggatgggaaaattattttaaatgaaggttaaaaaaattgtatgtattttttatattatttaatattgagagtttaataatattttgtttttttgtttttttatttttattttttttggaaagaagagtaaggaagagggagagaaatagtttggtatttttaggtagattagggagtattttattggttggagtaagatgtgggggtttgttgtttttgtatattagttttggtgtttgttggtttttttttttaggaagtgtttcgggagatttaggatgtagtggttagggcggggtaggtggtgcgggaagtcgttggagggttgtagatcgttcgtagttttggggtcgaggagtatgaagtttgtcgttataaagaggtttttgaataatgtcggtagttgtattggcggagagatttggaacgcgttttgtatttgttcgtaaggagggtaagatattagagtggttgtgaaaggagtttaggaaagggggagggtaagggaagaggaaattatagttggttttagaggtttttgtagtttagttttatagaggtagagagggggaaagaatgggaagatttttagttttattttttttttttttttttttaggtgttgtatttgggggtgtagatgttgatgttgagttgtgggttgtagtagatgtaggatggggagtttatttagggtagtttgtttttttttatgatttattaggagagcgtggggagttatgtgtaggtgagcgagaagttaagtttgttttttttttttttttttttttttttttgtggatttttgggttttgggttttatttgttttttttaataatataatataaaattaaaattcgtaagtaattttgttatggagaattttaaatatatgttaaaaatgagataaaataatattataaatttatatgtatatattttgtgttttaataatgattaatttatgtttaattttgttggatttgtatttttagttatttttttttatttatattattttgaagtaaatttaagatattgtatatttttatttgtaaatattttagtatgttttttaaaaatataaatatttttaaaagtgtataataataaagttattattatattaaaaaattaatagtagtttttaaaatttattaaatagttaattgttaaatttttatttgtggtatttatgtagtatatgtgtatgagtgtgtttattatattttgtttaaattaggatttagaaatggtttatatattgtgattggttgatatattttttaagtttgtttgtttatttatttatttatttatttatttatttatttatttattaatttatgtatttgtttaaaagttttttttgtatagtttatttgttgaagaaataggttgtttgttttgtggagttttttagggtttggattttgttgattgaatttttgtggtattatatgtttttttgtttttgtattttttgtttattgatagataaatttagaagtttgtgagattgaggggttttttttggtttttttttagtaatagtattttttaggtggtgatgtattttttttttaagaggtatataatgtttggttttttatttgtggtaatattagttattgatgagtagtatttatatttatgatagaattagggttgtaaaagggagatattttattattttttatgtattagttgaagtagtttatgaagggagatttttttttatttattattttattattcggtggtatagtttgatgaggaaaggtagagtgagtatttagatttttttttatatttattagtttttaaaaatagttattttatttagggttttatttaaatatttttttagatatttgataaatattttttttgtgtagagaattgcgttgggtattttgacggttataaaggtgagttgggtatagtgtttgtatttaaggagtttttcgtttaattaagtaagatagaattgggtataagtaataggaagtagtaattgaaaagatttggggttagaggtaatgttgtatggtaggagaagggattgtatattttttatattgtaaattggaatattggggtattggtgttatttttaaatttcgtttaaattgtatatttaaaagtggagaattttttttgagtatggaggaggagtagtgtagttgtgagtggagtgtgtgaggagttgggagggtggtttttggtagaagtgtgtttaattagtcggtttttttatttttgttttttagattttggtatatatatatggggatatgtttagtaacgtgggagttgtagagaaggtttttttttatatggatcgatagttaaatttgtttttatttggtacgtttgtttttattattttgtagggggttgtgaaattttaagacgttttttttgtatattttaatcgttttgataggtttgtgtttaaggtgtttgaaagagggaggaaatttggatttttgttttttgttgttaatgtataattggatattatagtttatagtttatttgtttttgagaatttggttttgtttttgttaagaagagaaatggagggattttgagggagaaggggtaggtttttaattttttttttggttttttaggggttgacgtttattttacgttttggtgaggtgacggcgttggtgggatttaatgggtttgggaagagtatagtggttgttttgttgtagaatttgtattagtttatagggggataggtgttgttggatgaaaagtttattttatagtatgaatattgttatttgtatagttaggtgggtgaggagggagaagataggggataggagaggggagtatgtatagagagaggatgggagatttacgggaaggcgtattaggtgtttattttgagggaggtaggtggggaggataaaagggtttttgttttgggggtttatatatagttttttgtttttgtttttgttgtataggtggttttagttgggtaggagtttgtgttgtttttcggttttgtgaggaataatattgtttatgggttgtagagttgcgaagatgataaggtgatggcggttgtttaggttgtttacgtagatgattttatttaggaaatggagtatggaatatatataggtattttttataaattgtaagtttgtttttttagtaaaaaagagaaaattagatttatttttagtggtgaaggtcgtgtttttgtagtttgatgtttgttgtttttttgtttttttttttatttttacgtttttttttttatatattgaattttttagttttttttttgattaagagtttttgtttgtagagagtaatgtagtagtggtgttttttttatgggtagtttcgttaggtttttattttatggttttttttttattgggtttttttcgtattgggtttttttatttttcgaggttttattggaagtatttgttgtgtatttgtttttttttgtgtgttgtttgtgttatttgtatttgaggaagggaatttttttgatttttttagatgtaggggagaagggaagttagttggttgcgggatagaaataacgtttggttattgttcgggtttttgtacgagattcgcgggtttttattttggatgaggttattagtgttttagatgtgtagtgcgagtaggtcgtgagtatcgtgagagggtaggggatagtggggtttgggaggggtatgttgggaggattagattgtgtagaattgggtagagggaggacgaaggatttattagtggaaatagtttgtgtttttttggggttggggaatggaattcggtggtgtgagggtagttttagtttttttttgggtttttatttttttagttgtggtagtatagtcgggagagaagggtagtttaggtttttatttattgtttttttttatttttttttattttatattttttttattttaaattataagagatggtgtttaggtggatgtggtgtttattttatttttgtttttttgaggtattgtgattatttttttagttgtaggattggaattttcgtggggatcgtatagtgttggtgattgtttataggttgtagatagtttagcgcgtttattagattttggtgttttaggagggtaagttgtagaagtttgtttagttttaggagggataggatttttattttcgtttggtgtagtagcggttgatggattgaggttttagggatattgggttttttttttaggggcgtttttaggatttagagttgtttttgttttgagtttttttagagttgtgcggttagatagttgtttttgagttgtaggtacgatggagatttggatattgtgtgtttttggtggggtagagaggtggggtggggtggggtgggggttgtttgtgtttaggaaatttaattttttggtgattagagttttgtttggtgatgaggagtattttgtggtataatatatatattttaaaatatttttttttttatatgaattgtatatatttatatagaaaatttagataatataaaaaagtataaagaagaaaagtaaaagtatttattgttttattttttggagataattatagttgttattttgttgtttgttttattagtcgtttatttgttgtttgagatagaaattaattaaaaatgatataaatatttatgagattgtttttttatatttttttttgtttttattagtgtttgttattttgaagaagttagggtttggagggatagagaatagttttttgattaatagtattaatagcgatattggtaatagttattatttatagagttttaatgggagtaggagttatgttaagtgttttttatgtattatcgtttttaattattatttttaattttatgaggttggttattatttttattttatagatgaggaaattgaagtttaaagaggtttaatgatttttttaaggtggtcgtagtggtggagttggagtttgaatataggtttgattttagagtttatattttgatttaattaattatattgtattttgggtttataaattttaatttataattttattaagaaaagttttgttgtttttagttttaaataatttagaatttatttttttttttttagtttcgttgttatagtttttatttatagatttaagatgattttattattagagaggtttttttattattagtttttttttttcggttattttttataaagttatttttttaaattttgtgttatatacgatgatggtatttttggaaatttttttaggtgtttttaagttttgttgtagagattttttttagagtatatattgttttagtttatttgttttatttttttttgttgtatttagttttacgataaattttttgttttttttaatatttttgtgtttttgtatatggtgtttttttgtttattttttgttcgattcgtttttgatttttaagtttaagatttaatttagggtttaggttttttaggaggttttatttatgtcgttagtttggggaattttttatgtgtttttattattgtgcggttattttttttatagtttttttaaagttttatttttttttttttattttttttgattttttattagattatgagtatttgggcggaaagttatatattttattaagttttatatttgttatttggtcgagggttaatttatagtggagaataaatagttaattgaataaatgaataaatatttttattatcgtattaattttaattttttttgtttatttttattattgaaaatgtaatattgtatatattattggttgttgggagggatttattttggaaagttgttattttaggaaagagaaatttttatatttttggaaatagtaggtagtttttagtgttggtaatgaattttttagaattgttgttttggatttttttttgtttggtagttgttgggagtagggtgtagtgaggatggagtgagagtgggtagttttttgtgtagatttgttttttttttattttggggttgatttgtagttttatatttatttattttttaaattttatagagggtaaaataggtatttggagagaaagaattttggtttgattttttttttttttataaatgttttttatttataaaataggaataataatttttgtattttttaattatatggaagttgtagtttttatagaagaagatgatttgagaaattttttgatttttttagtatagttatatttatgtattataatattttaagtttggaaggtattttaaaaataatgtaatagttaaatttaattttatagagaaattgatatgaaattacgtagttaattatgataaagttgggtggaaaatttattttgatgggtagtataggaagatgtagtagattttaagatgttttgaaagttttttattttaggggaaatttttaggtaggttttatgttagggatatagaaaaatgttttttgaaagttaaaatattcgggttagatagataaatttttgtaagtgtggtttgtttgggaattatagatgttattaattttggtttgttttagagttttttttgtttatttttattttttattattatttgattgatttttttattttgtaattttttttttttgtcgtttatttgtagtattttttttatttaggtatgttttattttttttaaaggaaagtatgaatggagaggggaaagtttgggaaattgatagatttttttggatgttaaaatatttttatagtttgtttgttcggttttatgtggaaatagtattgagttttaagttttttatgtttttatttagggatagttatttggaatttatatggtaattgtgaaataagtaggaaatgcgtaattgttagaattttgtggggaaaggattagggaataaggaaaataaagattttttttgtgttttagagttgttagttagaggagtatttgtttgagtttgatgttatttaatggttttagaagaaattgggttttgaatttagagttttatggatttttaggaattagatttttattattattaagtatttattggtgtttattatgtgttattgttgtgttaagtatttgaaatttgtttttttattttattttttaagataattttatgtggtaggtattattattttaattttaagagtgagaaaatggagttttagaaatatttattaatttgtttgggttatatagttaaggaagaggtggatttgtttagttttgtataaaattttttaaaagagttgtttatattttttgattttatttatttttttattattttttttttaaaatatattatttatttatttaaataagtaatatatgaatgtggtttgaaatttaaaagatataaagaagtatatagaggaaagttttatttttaattttttttaaggtttgttaattttttttgtataggtaattcgtttttttagttttgtgtttatttttttagagaagtttattgtgtattaagtaaatatgtatatttttatttttgtttagtattttcgtaaatagtagttgtttaagtttattgttttgaattttattttttaaattaaaaatatatggttatgtagtattttattttatggaagttttatattttatttattttgtttttttttattgatggttagttaggttattggaagttttttgttgttgttagttagttttgtatagatattgtaatgtatatgtgtaaaaatataagtatgatataattttaaaggggagttgttgagtttaatatatatattataaatattgatagatattgtaaaattgtttttatagaggttgtattaatttatagttttagtagtaatatatgagtttatttgtttttttatatatatatatatgtatataattaatagatagtgttaatttttaaaattttgataattttttgggtgaaagtagtattgtattgtagttattatttgttttttaatattattatgtaagtaatagagatattaaatttagaaggataagggagtaaagatgagaaaaataaatatatatataaataataataataaatttgtttaaaatattggaaaattagaatgagaaatgaaatatgattgtaacgataaaaattagtaataaaaatgattattaaatttaaaaataaggtagagtaattataagtgatatgagaatgaggtagataaagttaaagtatttaaagtttttgttttgtttgaaaggagggtagagatattgattatttttagatgttgttatatttggtaaatatgttaaaaatataagattgatttttaattaatataattagaatttaaaatttttaaattagtaaggggaaattaaataatattttaaataaaaatgtaattgatttaatataagtgatgtaaggaaaataaaagaagtaaagtaagatatagtaaatatagagtattatatattgtaatagaaacgaatgtaaatagtatagtgattataagtataaatagtttaaatatgggagttaaaggaaagtttttagattagattaataatatcgtaaaatttagttatatgttttttataagattataagaaatttaaaaatatgaaaatgttaaattaaaattagatataagatatataaagtaaatattaatagaagatagaaagatagtttatgtaattatagaaatatttaaatatatagtttaaaattaaaggtattagtaaaaataaagatagttattatatagtgataatgaagttattagaatattatattaaaattgaattagtttgtatttagtaataaaattataaaatatgtaagaaatataggagaattataggaagaaattaattgagaaattgaaatatattttttaatgattatagaataagtggaaaaatgaataaggatattaaataagtttgttgatgtttttgtttgtaatatttaggaattaaaatatattttttaaaattaataaattaagtgttcgtatttatatatttaagattataaaggtagatatatatatagaaagaggaagggagaggatatgagttagttttgtgattgtttattatttaaaattaataggaattatttaaaggaagagggaattaagtgtattatatataaataaatttattaaagtaattttgaaatatatattttttttaatatttgaaaaggtaaaatttttaaaatgtataataaagatatagtgaaagatttttaaaaatatttatgtaaatattatatttaatagaagttaatatttttgaattagattgaatttatttgttgtatgaataattataaatgggttttttaattgaattaaataaatgaaaatatttttaaattagattaagataaaaattttattatttgtaatatgtaaaagatatttaatataaagttatttagaaagatgtatttattatttttaataaataagatgatgggtaaagatataataagagaaggtaaataaaagggaagtagaggttatattcgttttattaaataagatgaaatttagatattttttattaaaaaaaaaaaaaaaaaaaaaaaattgagtgtgatagaggtatttataatgtaaagtataaaatttatatgaatatatgagatatgtgtttaagttttaaatattaaataggtagtttttataaagtagaaattaaggtagatataaggaaaatatttagaaatgtattattaatagaatattttaattttttttttttggattagattagttaagtggataaaaaaataggttgggtttggtgatttatgtttgtaattttagtattttggtaggttaaggcgggtggattatttgaggttaggatttcgagggtagtttggttaatatggtgaaattttgtttttattaaaaatataaaaattagttgggtgtggtggtgggcgtttgtaattttagttatttgggaggtcgaggtaggagaattgtttgaatttgggaggtaaaggttgtagcgagttaagatcgtattattgtattttagtttgggcggtatagtgagattttgttttaaaaaaaaaaaaaaaaaaaagtatgaatatagaagatagaagatattattattaataaaaaaatagatatgttatatttatattaaatttttaaaattgaaaatagaggtcgggtgtagtggtttatatttataattttagtattttgggaggtttaagtagtcggattgtttgaatttaggagtttaagattagtgtgggtaatagcgaaaattcgtttttataaaaaatataaaaattagttagatgtggtggttcgtgtttgtggttttaattatttggttgaggtgggaggatcgtttgggtttagtttaaggttgtagtgagttatgattgtgttattgtattttagtttgggtaatagagtgaggttttgtttttaaaataaataaataaataaataaaaattaaatggtttaatggtatagaagaaaatttttttatgaagtaagtataatattgatgttaaattatgataatgtataaatataaaaattgtagatgaatttatttattatattgatataaaaattttaaataaaatattgtaaatagattttagtatagattaaaaaatatttattaagattaaggggttttttttgttttttttttttagaaaattttttggaagtttatgatattttgaattttagtggatattttttgggaataatgagtttaaatgaacgaatatgtggaataaagtattattaatatttatttttttaggatgaggtgatggataaaattattatagggaaattgaggtaaatagtatatgtaaaataatatttcgggtgagtttatttattttaaagtcgtattaaagaagtggttgtagattggagtttaaagtttttggttttttagtttttaaatggatttttattaggtgggattatgagtttgttttggatattttaaattttaattattttttttgttttttatatttttttttttttttttagttttttttttttatgttatattttttgttggtttgagacgttaattattattgagaaagaattaaattagtattttgagttggtaaaatttttagtttagtataatttttttaattaaattgtagtttaataatgtgttttttaaaagtatgatttaatattttatttagaaatttagaatattttttataatttttttagggtagtgtggattatgttgatgtgttaggaggaagtagaaggaagaaaatgaattgagatgtacgttttatttttatgttaaagttattaaaatagtagttgaagggatatttgtgttaggtaatagggagaataataattttatgttatttttaaaaaataattatatatatatttaaatttttttattttttagagaaaggggaaggaaagaaaagagagaagtaaaatatgagtttgagtgaaaaattatagaggagtttgtagttatttagggagggttgttggttgaagttaggtaggaaaaaaagattaaaatattttgttttattttttaggttcgtttaagtagaagataaaaatataaatataggagaaaggaagaaaattatatttttttttttttgtttttttagaattgaatagtgtttttgataagtttaggtttttttatcgtagatattgatattatgtatagaaaatgatttaaaaacgtttttaatgggggtgaatttgatgttttagtttatttaagatgtattagaggttatttaaggagatttatagtttgttaattgaagtttattgttttttttttttagtttttatgttaggttttatgttattttttgtttgttatgtgagattattgattttttttggttaggtaggatatgatttttttatagagatttgttttgatattaaatagttatgatgaaattttttggttattttttttttttgtgtattttattattatcggaatgttaaagttgtaggaataaagtttttttggttttttaagaaatatagtgtgatagaaaaagtatagtttagggatttattagttatgtgaattttggtttattttatttttattttatttgtaaaagggagattatgatagtatttattgtaaagggttttgtgtgatgatttttttttttttttttttttttatatatatatacgtatatatttatataatgtttagaaaatgaatttataataagtaattgataaatattagttattattatgtaggtaagttagattttagagtttgtgagttttagatatatttatagagaagaaagagtagtttttttaattttttggtttagcgttatattttttattttttttttatttttatattttttgttatttattaatttttttttttttttaaatttaaatataggttttcgtttgatttatattgtttaggtttttttttttttttttatatggttttttttttagttttgagggaagttgtagaagttagttatggtgttgtttataaagaaggggatatacgttttttttattcgtttatgttgttattgtatttgattattttcgtgtcgtgtttttgtttatttagtttgtgttgagtgtttgtttttatttttaaatgtaataaaatatttgggaaagattaaggtaggtgtgggtaggaagaagggaggaagttagatttagtggtttgagtgttttttgatgtttttttattttcggttttatataagttttcgttagtgtgagttttatagttatttatttggaggaggagtatttaaaattagggttaaatgttttgtattcgggggtttattagtaagtttgtggttagttttttattttatgaatcgttatatttatatgagagatgtggagggagaggggttagttttttagtttttgttttgtagtagttaagttaagttaggttaggttgtggtaattaagttagtattttttttaaagaatagttgttttttatttatatagagtgtgttgtaggtgtgagtgattttttggggtagttgttttttatggtgatttagttaattagattgtttttttattgggattgtgttattttaatataaggttgttttggttgatttggtaggggaggaggagaagagttatgtacgaggagttaaattttttgattaggaattttttgtttattttttattggtgagaacgagttatatagttttaggagagtaggaagtttagtttttcgttttttatgggtttaggaattagaggatgaatattagcgatgttttttacgttttgttttttttttttttatttgttataattttttatggagaagaaattatttttttgattggtttgatttaggtttttaattaagggtatttattaagggttatagaatagtaaaaggttgtataattgtattttattttttttttttgaattttgtttaattaaaattttaaaaatttatttatagattattttttgttttttttagttattaaatatatttttttttaatttttttttgatagattttgttttgtttttagttgatttttttgtaattatttaaatggaatttttttatttttttttattttttgttaatcgttttgtttttatttttttatttgaagaagtgtatttttttttttttaagttttatgttttttgttttagtttatttgtgttagtgtaataagatatacgagatagggtaatttatgaagaatagaaatttattttttatagttttggaagttagaagtttaaggttatggttttggaagatttgatgttttggttatcgatttgaaaaaagttattgaagtgaatttgtggttattatgatattttgggtttatttttaatatgtatagtataggtaaattaggggtatattttatgttgaaagatgatgtgaaatgatgagtaaatattgttttttaaataataataatatagatggtgaattataatttgtatttttggttttatttgtttaaagatagtgttttattgtttaggttttattgaaagaatatttaattaaatatttgagttaaattattttagtgtaatagtttttataaggaggaaggtagaagggtaaaagtgttaagttattgtttttagtttttttatttttattgattgattgattgattgattgagatagggtttcgttttgttatttatgttggagtatagtggtgtatttatggtttattgtaattttgaatttttgggtttaagtagtttttttattttagtttttaaagtaattaagattataggtgtatgttattatgtttatttttttaattttttaaattttatttggatatgggggttttattatgttttttaggtaggtttttaatttttagttttaagtaatttttttttttagttttttaaagtgttgggattataggtatgagttattatttttgttttttttagttttttttaaagtttttaattttatttaggaggtttttgtatttatgatttaattattttttaaagggtttattttttgatattattatattggtgattaaattgtaatatttgaattttgagtgatatttagattatagtattttggagaaaatgttttttttttttttttttttttttttagttttttttttttatagatattttgtattttatttgtaattttgttgaagttttttttgttttaaaagtttttttttttaaaatattagaatttattttttttgtttaattgtaattttgtatttgttattaatttttatttatttttatttttgattttttagtttttggtaatttttaacgtattttttatttcgatgaggttaatttttttagattttatatatgagtgaaattacgtaatatagtttttttgtttttggtttattttatttaatatagagttttttaggtttatttatgttgttgaaaatgataggattttatgtttttttatggcggaatagtattttattatgtatatatattatatattaattattttgatttgattaatatataatgtataggtgtgttggaatattatgttgtattttataaatatgtataattattacgtgttaatttaaaaaatttaagaaaagtatttttttttagtgttgtttttttttaaagtgtattttatttttttttttgtttttatttttaaaatttttgaaagattattttaatttgcggtttttgtttttttgtttttaatttatttttttgaaatatggtttttatttttaatattttgttgtttttttgaaggttattggtgttttattaattataaaatataataatgtttttttagattgtattttggtgagtttttttgtaaaattttattttttgagaattttttttttatgttttttttttttttttttttttgtggttattttggtttataggaaatcgtattttttaaatgttttttatgttttttattttttttttgataatttttttattaaatttttttgaggtatatgttttagaatgtttaatttatatatttttaatttttttttaatttatatattgtttgtcggtaatgttaatatttaataagaagggagatttattggttagaataggttagggaatagaagaatatataataaatagtttgtttagtttttttagggttttataatatgttaaatatatatttttatttttttttttagtttatttttagtatatttaaattattgttagtgattttgtaggtaaataatggttgagttgtatgatataattttgtgaaagtattttatttagtatttgatgatgtaaaatttttttattttgattggttgttaatttgaggagtttttaattttggggaagttagaaaaatagcgatttatatttttaatgggtattttttgattgaattttatgagtttattttgaagaggttgacgattttattattttattttttttttttttttagaatgggttttgggtgggttttttgggtggtggttttgttagtgaatttgattcgattggatttttttatgatttaaggtatagattttttaggtaagaatagagtaattgtttttttttagtgtgtatgtaagaattggtatgggggagtgatgtttttttttgtaagtttaggttatagattagattggaagtggtttttggttttaaagaatagtgtttttttttttggtagaaaggtacgttttgtttttttatatgggatggattttatatattagagttatttatttaaggggtagggaggtaggaagagggaaatattgtgttttgtttaggatttttattgtgtgtattaattttagttagtgtttgggcgtgttgaaggttttggtttgggttcgagtttgttgggagaaataatttgtagtaggttgggttatagaggtaatttgtgattttttggttaggatacggaaataaattttagttggggtatatgtggataaatgaaattggaaataaaggttgttttttttgttatttattaagttattattatattgttagaattgtattaaatagttttgagaagtaagagaagttgaatagaatatattgtttttgtttttcgtttattaggtataagttatttgttattgttatttttttagtataggtgatagaatatgtagttatgaagtaatgtgagatgaaagtatatattaatgagtagaaataggatgtaatgtgttaagaatagaattttttttgtatgttagttttattaaatataaaagaggaataaatttggttaggagagattattatttttagagaatagaaatcgttttgagtttataatgtttattaaataatataattgaaaaaaaaattagtatagatgttaaatgatgatgaaaaatttagattttttttttagtttagattattagaggaaatagagaagagtatatatgttgagaaattataggttggaattttatttgaaattagttattgagtgagggataagtggggtttatttaggaaggttatttttatggtttagtttagagttggaggaggttaaaggaaaggtaaattataatttaatattaatagtaattattttttaagttttgatttagatgtaatgtttttaggacgttttttttgatttatttatattattaattttatttgaattttttttttattgtagttgttgtttttaagtgtataggattggtttaattttatttaatgagtttatagtatattgtaattattggtagtagtgtaagattttttcgtttttttttttgttttcgtttttatttttttttttttttagagaatttattttaaacgtgtttggtaagtttttaagtatgagagtggtttttagaaatatgtagtattattgttttttatgtgtttttaaaatttaataaatgttattttttgttgaattttattttgtttttttttttatttgatattgtgttttttgagtatattgaggttaaaggtttttttttagatttatgtggtttgacgtaatttattaggtatgggtttttttagaggagggggttggtttatggttttggttttggttttttagaagattttgtgatttaggtaaaggttgattgttattttattaacgggatagaaaaggtgtagtttgtggttagatttatttttaatttggaggagtatgtacgtttcgatagtgatgtggggatgtttgtggtattgattaagttggggtagttagatgttgagtagtggaatagtcggttggattttttggagaggagtagataggtcgtggatggggtttgtagatataattataggttgggcgtattttttattgtggggagaaaaggtgagttggaagttgaggtttggcggggtttaggaatgttttttatgtgaatttggttatggttttttttttttataagtaattttttgttttaggataaatggttgtttgtgtagatgttttggttttagttgtgatatattatttttataagttagttattgtgattttggttttagatttttaaggtttttagggatttcgagggttattgtgtttttaaagagaagtagtaattgtgggagtattttagaaagtttaaatttttttgataggtattgatatattttgttattgattttgggggttgagatttgtttatattttgtgtttatttgggtgatttgggaaagagattagatatagtgatagtttttaaagaattttttgttttagtttggtggtttttttttacggtgttttattttttttttttttttagtgtaattagaggtgatagtgtatttagagaggattttatttttgtattagtataatttgttgtattgttttgtgataggtttttatttaggggatattaagattaagtggtttttgaatgggtaggaggagagagttggggttatgtttattggttttattaggaatggagattggattttttagattgtggtgatgttagaaatgatttttgaatttggatatgtttatatttgttttgtcgattattttagtttgttgagttttgtttttgtggagtggagtgagaattagtttttagtattttttgggtttgatttaggattatattgatttaatatagagtttgtgttatttttgcgtttattttggttataatatgaattatttttttttttgatttgggatagttatagaaattagagtttttgggttagggtgggagaaaatatggtagatatttatttttatattttttaagaaatgaggagatttaattattttattatgtgtttttaattttatgaattggtgttttttaattttttggttttagtatttaggaggtatttttatgggttgtgagaatttgtaatcgatggggggtaattttatgggtgttaattttggtttcgaagaattttttttaaatttatttatttttttttagttagtattggatttggtgtttagtatagattttgggattttaagaaagtgttttaaatattgggatatttttattaatttaaagatttgttttttataggagtttagtttgaatatttttggagaaagatgttgagtggtattgtagtttttttatttgggttaattttttttttggtgggaattattatttagttaagggtttagaaaggtaatgagtttgtgaggagtgttttgttatttgttttagattttttttatttttattttttttaacgttaatgatttgaggtaaggaaagttgattgtgttttttagggattatcgggataatttttttttgaagttagaaatgggataagtagagagagtgttgattttgttagttatttgtttttttttcgggataattatattgggttttaattggggtaatttatttttttttcgatttttttttaggatatgtgaggacgtagatgtttggtaatgaggtaatgtttttttttttttgtttttgagtggtagattattttttcggttttttggttagagggagatgatatgggggtagggaggagtaaggttgttgttgtttggatgggattgttttttgagtttttggaacggttgtggggggtggtgaggttgttttttgagatttttattattgtgtttttaggttttaagagttgttttgtttttttagttatgttaaggtttttattgaagtttttttttttggagtttgaagtagtgatgagtagtttgggttttgggtgaggtaaaggatatttatgaggttaatgttttgggaataatttttttttttgatttttggaggagttcgaattgattttggagttttgtgttttgagattatgtattttttatttatttgttttttttttttttacgtgtatattattaatttttattgttaagggtattgtttagaaatttttttgagattttattttttttagttttaaattatttatttttttgtggtttagttttatttttataagttatgatttttaaagttttttgttttttaattgtagtttttatagtttttagaagataaatgtttaggtagttattgttttttttttattgtttttaaaaattttttattgttaaataaaatggagatataaaaaatgtatattttagtgaattatttaagaaaaatttttgtaattaagttaaggaataggattttgttagttttagcggaagtttttgtacgttaggttaattaaagttttttttttttttcgaaagtgattatattttgattttattgtaattttttttatgtttttgtagtttagttttttaggtatgtgtttttggacgttatagtttagttgttttttacgttttttatattttattggtttttttttttttagttttttttttttttttatgattaatttgttgaaaagtttaatttatttgatttgtagagttttttatattttggattttgttggttgcgtatatatggtgtagtgtaatatattttttgttttttgtgtttttcgtaaattggtatttggatgtagaggttggattagattttggtttaatttttttttttggaaaatttatacgtggtgttgtggttttttattatgagagatataatttttagttgtttttttttgtgatgttagtaattattgatattaattgtttaggtttgttaatttattggggattgttaaatggtggtattttgttattttttttttatttatatgttttattaatgttataaagagatagttttttttatttattagtgaagagatatttttttttatttattagtgggttatttagtggtatagtggaaaggtaggattagtgtttgattttttttttatttattagtttttaagttagtaaattggttttttattattaataaaatttatagatggttaattaggttttattttttattttttaaataattataaatagaaggatttaaatgtttgataggttttattttattgtaatttttatgtttgttaaagtttatattttatatttttggtgagtgaaaatttttttaagtggttaaaaatgaaattgagtttttttgacgtaaattttttttgataatttttttgttatttgggatgataatatgtttttggtttattttgtttattttttggttagatttggaggtagttatttttttagaaatttttggtttagtttagtgggaaatgatatttaagattataatttagcgttagggtgttttgttttattgaattcgttgttggagttattttaaaagtggcgttaagggagttattataaggaagtttttgaaattattttgagatggtgtgggttaggatttaaagaaagaagtattaaatgttagggtgattagtttaaaatatttgtttagggaatttatttatagagggttttaggagtttttgtagatagtaagagaaaagggatgttttgtttaggtatgtttgtagcgagggggttagggtatggagtttatatgaaggtttaaggaatttggtttagggttgggataaagttttagtgtttagagaaataatttagatacgtttattagtgtttgggagtgtttaaggttttggtttgggttcgagtttgttgggaaaaatttgtagttggttgggttatagaggtattttgtgatttttcggttaggatatggaaagaaagtagggagaggggtagtgggggagtttaaatagataggaatggttattgtgtttagtttgtttaatggtaataaaatatttatatatgtatatatttaaaaaaattagttatttaggtacggtggtttacgtttgtaattttagtattttgagaggtcgaggcgggcgaattacgaggttaagagattgagattattttgggtaatacggtgaaatttcgtttttattaaaaatataaaaattagttgggtgtggtggtacgcgtttgtagttttagttattcgggaggttgaggtaagagaagcgtttgaatttgggaggtggaggttatagtgagttaagattgtattattgtattgcggtttggtgatagagtaatattttattttaaaaaaaaattagttttttttatattatttttgtatttttttttttttatattaagaattttggtttttaaggatatagggatagatataattagaatgtttatatttatttgttttttttgagttaatatagatagtagtttaaggataataatatttatatataattattaaaatggttattgaaaacggttgaaattttttttatttatattttttttattatttgtgttttttttttttatttatgttttttttcgttttttagttgaattatgtttatattagttgattttgtattattgtatagattatttgtttttttgttagttttagttttgtgagtagagatatgtttaatgtttattattattttttatgttgatatttttgttatgtggtggtttttaaggtgtggtttatggatttttgggggtttttgggattttttaaggggtttatgaagttaagttatttttgtattaatattaagatgttatttgttttttttattgtattatttatatattggtatagaaatttatggtggttacgtgaaattgttagtgtttgagtataaattaaggtggtgatataagttgtataggtaggttatgttttttattcgttataagtttatagtaaaaaaaaaaaaaaaaaaaagtaaaagttagtgattttgatgaagtaataaaattattagtttattaaattttaaattttaagtatatatttgtttaatagttagtgtaagaatataggtagtatttttggtgtatattgatggaaaggtagttgttttgtggaaaagttattatgtaattgtatgagttgtgagtgaagttaaatattttttttttagtgggttattattttttttgaaagaatgattgaaaggtatattgtgattatttagatttgggtatttggtagaaatttttttaaaaataaataaaatgagtttattttattaaagaaaataatattgatagtggaaattggaattttaagagaaaattaaaattttggaaaatttacgtgtgttatagttttttattatttaaagatgtttttgatgagattggtggtgatattaataaatatggtttaaaaaatattgtttaataaaatatgttaatattttaaaaatttgcgtaaatttatgaattaataatttataaataattaatgtatgatattgtaaagttatgtataaagatttatttaaagatagattagtgaattttaatataatagaatatgaaaagttaatatataaggttttagattttatattgtaattaatttttaagaatttgttattttttgagttttggtgttttattaaggaagaatagttacgatagttgaaatggttatggaaattttttttttttttttaattgtgtataagagtgaggttagattttttttttgtgttttagttaaaataatatattgttatagtttgaatgtagaagaatatataattaagttagttttattaagttagatattaaagagatttttataaatgtaaaataatttttttttttttattatttttttgtgttggagaagatagttattttttataaaagtgtgttgtttatgttaatatgtaatgggtttgttattgttatttaataataaataaattaatataaatgttattttatataatttatgtaaattaaagttttttggtgtttttaataattttatgaataaaaagggattttgatattaaaagaattataagttattgatgtagttattatgattgtttgaaattattttttttaggtgttttaggaagatttaggaaagtgttttagtttgtatgagttgttataattaattattagagattggatggtttaaaaatagtagaaatgtattttttatagttttggaggttggaggtttgagattagtgtgttagtttggtagggttttggtgaaggtttgttggtagtatttttttattaagattttatgtggtagaaggaaagggagttatttggaattttttttataagggttttaatgttatttataagggttgtatttttatgatttaattattttttaaaggcgttattttttggtattgttattttgggcgttacgattttattatatgaattttgggacggtatatatagtttatattaggaagtttttgtattttatagtcgaaagttagttttgtggttataaaaattttggttttatttttcgtttttgagtattttaaaaagttattatatttttatataattgttattaaaaagtttgatgataatttaattattaataagttattgttatttttgttgagtatttagatggtattttttttttttttagtatttataagttttattggaatgtattttggttggggggagggtaagatcgttgattagatgtagttaggtgaaatagtttttaatgaggaatttagatgattggcgtgtttttaatagatgtttagatagaaggtatttagagtggatagagggaagatatagaagttggattgaagtgggagaaagttgggagttttatatggggttatagtatatttagatttatttttgttttttaatggttttaggaaaatgggtgagttgaattggtaaggaataatttattgttattatgatttttgtaattatggtaggaggagatttattgattattatggatatttgagttggtaggaagagttgtttagagaagtcgtaggggtggtaagttagcgggtgtggagtttagaggatttagtgtaggagtatttgtagtggagtatggttagggatggttatttttttaggtttaatttatttttataggagatattagttttagggaaattgttggttttgaaatttgtagggtggttttgtttattagatgagtttggttttatttgagtaatcgttggttttttggttttttttggggttttggtttggttatatttgtttgtaaagtagttttaggtgttttgtgggtttgtattatagtttttatattggtagattatgattgattagtaagtggagagttttaacgaggaggtttttatgattaggtattagtttgtatgttttttttttatattgtagttttttttgggtttatagtaattttttatattattttgttggtatatgtttgttgggtgggttttgttttttttgttttattagtatataggagtgtaatttattttttattaatttttttttgatagttattgtagatagagttttggtgggtatagagttagttagttttattttttttattattttattttgtgttaatattgtgtagagaatagttgatttttttttattttgagtgattatttttgtatagaaaaggtacgtagatttgtatttgttaatgttttgtttttaagttaatattattttttgtgtgattatatatatagttgttagtaggggatttttttttttttttgtagttgtattgtttttgttattgtggtggatgtttgtagggaggtgggtatttcggtatttgttagtattttgttgtagttttaattattattgttgttggtatatttaaataaggatagatttttttgttattgtattatgaaatattttggttgatattatttattggagtgtagtgattagtggtttgggagtatttcggattgtattatttttgttattttttttatttttcgtttattatagcggatttttaattttgaggaaatagagaataaagttagggtttcgtataagttttaaagaattatagtatgtagtttaggagttgggagtggaatattggttaaataaaattgtttagaaatgaagttagttggttgaatttattttatattataattaaatttttaaagttattaaataggataaataggataaataaaaaaggttggatgatttttgttgtttaaaggttagtagttttaaagattaaaggaaaataagtttataaagatgagaaagaattaggtaagaattttgataatttaaaaagttagagtgttttttgttttttaaacgattatattatttttcgagtaaggattttgaattgggttgagatggttgaaatgatagatatgtaatttagaataaggatagaaatgaagattattgagttatagaagtatattgaaatttaatttaaggtagttaaaaattatgataaaataatgtaggagttgatagataaaatagttagtatagataaggatataattaatttgatagagttgaaaaatatattataagaattttataatgtaattataattattaatagtagaattgatttagtggaaaaaagaatttttatattttaagattggttttttgaaataagatagttagataagaatagagaaaaaagaatgaaaaggaaggaataaaatttttgaaaaatatgagattatgtaaatagattaaatttatgatttattggtgtttttgagagagatggggagaatgaaattaatttggaaaatatattttagggtattatttatgagaatttttttaatttagttggagaggttaatattaaaatataggaaatgtagagaattttagtaagatattttataagaagattattttaaaggtatataattattagattttttaaggttgaaatgaaagaaaaatagttggtagttagagagaaaggttaggttatttataatgaaaagtttattagattaatagtggatttgttagaagaatttttataagttagaagagattggggttaatatttattatttttaaagaaaataattttaatttagaattttatatttggttaaattaatttttaaaagtgaaggagaaataagaatttttttagagaaggaaatgttgagggaattttattattattagatttgttttataagagtttttgaaggaagtattaaatatggaaaggaaagatttattagttattataaaaatatattgaagtatatagattagtgatattataaagtaattatataaataagtttgtaaaataattagataatattatgatgataggatgaaatttatatatattaatattaattttaaatgtaaatgggttagtgttttaattaaaaggtatagagtggtaatttggataaagaattaaggtttattagtatgttgtttttaaaagatttatgtgtgttatgtagtgatatatataggattaaaataaatagatggagaaaaatttattaagtaaatggaaaatagaaaaaagtaggggttgtaatattagttttagataaaatagattttaaattaataaagattaaaaaagatgaagaagggtattatataatggtaaatggtttaattcgataaaagatttaagtattttaaaaatatatatttttaaaagaggagtatttagatttataaagtaagtttttaacgatttttaaagagatttagatttttatataatgatagtgggagattttgatattatattgataatgttagatagattattaagatagaaaattaataaagatatttaggatttgaatttagttttggattaaatgaatttgatagatattttatagaattttttattttaaaaagatagaatatatattttttttattgttatatggtatatattttaaaatcgattatataattagaagtaaaatattttttagtaaatgtaaaagaattgattataagaaaaaattttttggattatagtataattaaattagaaattaagataaaaaagtttatttaaaatcgtataattatatggaaattaaataatttgtttttgaatgatttttgggaaaataatgaaatttaggtagaaattaagaaattttttgatatgagtgagaataaagatataatatattagaagttttgggatataattaaagtagtgttaagaaggaaatttatagtattaaatgttaatattaaaaatttagaaagattttaatttaataatttaatataataattaaaagaattagagtattatagttaattaattttaaggttagtagaagataagaaataattaaaatttagaattgaatggaaggagattgagatataaaaatgatttaaaagattaatgaatttaggagttggttttatgaaataattaataaaatagatggatttttagttagattaataaagaagaaaagagagaaggatttaaataaatataattaggaatgataaaggaggtattattattgattttatagaaatatagataattattagagaatattatgaatatttttatgatataaagtagaaaatttagaagaaatggataaatttttgggtatatatattttttaagattgaattaggaagaaattgaatttatgaatagattaataatgagttttgaaattgagttagtagtaaatagtttattaaaataaaataaaataaaataaaataaaatttaggattaaatggatttatagttgaattttattaggtgtataaagaagaaatggtattatttttgttgaaattattttaaaaaattgaggagaagagatttttatttaatttattttatgaagttagtattatttaaatattaaaatttggtagagatataataaaagaagaaagttttaggttaatatttttgataaatattgatgtaaaaaatttttaataaaatattagtaaatcgaatttagtagtatatttaaaagttaatttattatgattaagtaggttttatttttgggatatgaggtttgtttaatatataaaaattagtaaatgtgatttattatataaatagaattaaagataaaatttatatgattattttaatagatgtagaaaagttttttgataaaatttaatatttttttatgttaaaaatttttgataaattagttattgaaggaatatacgttaaaatagtaagagttatttatgataaattcgtagttaatattatattgaatgggtaaaatttggaagtattttttttgaaaattggtagaagataagaatgtttttttttattatttttatttaatatagtattggaagtttttgttagggtaattaggtaagagaaaagaataaagagtagttaaataggaaaagaggaagttaaagtatttttgtttgtagatgatatgattatatatttagaaaattttatcgttttagtttaaaaattttttaagttgataaataattttagtaaggttttaggatataaaattaatgtgtaaaaattattaatatttttatatattaataatagttaagtttagagtaaaattaggaatgtagttttatttataattgttataaatagaataaaatatttaggaatatagttaattagggaggtgaaagatttttataagaagaattaaaaagtattgtttaatgaaattagaaatgatataaataaatggaaaaatattgtatgtttatggataggaagaaataatattattaaaatggttatattgtttaaagtaatttataatttaatgttatttttattaaattataattgagatgttttatagaattagtaaaaattattttaaaatgtatatggaattaaaaaggatatatagatataaaataaggatatgaaaatatgtgtaatgttattagttattagagaattataaattaaaattataataagatattattatatatttattatgatggttaaaaataaaaagtaggtataatattaaattttggtgaggatgtagagaaaatagattatttatatttggttgttgggaatgtaatatagtatagttatattggaaaatagtttggtattttttttaaaagtaaaatatgtaattattatataatttagtaattgtatttttgagtatttattttagagaaatgaagatttatgtttagagaaaaatttgtatatgtatgtttatagtagttttatttagataaaaattggaaataaattgtggtatatttatattaggaaatattatttagtaataaaaacgaataaattggatataggtattacgatttggatgaattattagggaattatgttgagtgaaaaaaaaaattgtaaaatgttgtttattaaatgattttatttatataatatttttggaatgttaaaattatagagatggaaattaataattgttgtgttaatgaagaagtggaaatgggagggaagtggttgtggttataaaagggtaaaatgagggatattatagtgatgaaagtgttttttattttaattatattaatgttaatatttagattgtgataatttattgtagtttataagatgttatttttgggggaaattgggtaaaatgtatatgagatatttttgtaatattttttataagtgtttgtgaattaataattatattaaaataaaaagtataatttaatatagtattttaatatttttaataaaattaagtgttaaagtatttttataaattttaaatataaattggtgaggataaattattagtagttgtacgttattaattttttttgttatggattatgtttttggtgttaagtttaaaagttttttgtttaattttagattttgaagatttttttttgagagttttgtgattttatgttttatatattagattttgatttatttttatttttttttttgaaatttgtacgttttttttttttttcgtttattatattatttagaatttttaacgttatgttgaataagtatggcgagagtggatattattgttttgttttcgatttttgggggaaaaattttagttttttatcgttgtgttagttgtaagattttttgtagatgttttttattaaattgaggtagtttttttttatttgtattttttgagtattttattatgaatggttattgaattacgtattttaatattttatatatgtatattattaatttggattatatttttttaaatagttgtttgttttattggttgttaaatgagttgtattttttttatttaatgtttatatgaagtttttaaatatggattttatgttatatatttagttttttttaggtttttaatataaagtgatattattttagttatttaagtatttatttaggatttatgttttatgtagtttagatttattatgagtttgtatttatatttgatttttttttatatttttaatgttttttttttttaaataagtggtttatatatttggatttataatatttatatattttttgttattaggggtatatgtttttatattttaaagtacgtgtttttggagttttgtcgtgttatatgttttttttaaaataaattttttatgttatttgagagttaattttattttttaagttatttaggttgttgtaatttttattaataaaggatttaaaagttataattgtgtgattttttaggaattatttaaaaaggtaatttgatttattttttaaatattttggatttgaaataatttattagagtttatttttatgtttggaaagtttttttggatgttagtatttgcgatttttttatttagtttatgtagttaagtaagaaatgaattgtttttgttggttttttagtatattttgtttattaagtatattgagttgtttagaattgttttgagttaatagtgtaataagtatttaaaattttgtatagttaattttgtttgattattgtgttagaagattaatttttattttttttgttgataatattttgagtattttgaagttatataattgtagtggtaatttagcggaagagtgttaatattttaatttaaataattgattttgtattaaataaattttgatgtaggaatgtatttagtattaattatatggaattttttataaattttataaatagagtagttgtttttttgaaggggattaaaaattaaatattaatatttttattttagaaaataaaaaatgtggtttacgtttataattttagtattttgggaggttgaggtgagtagattacgaggttaggagatcgagattattttggttaatatagtgaaattttgtttttattaaaaaatatgaaaaattagttgggtatggtggtaggtgtttgtagttttagttatacgggaggttgaggtaggagaatggtgtgaatttaggaggtggagtttgtagtgagttaagattatgttattgtattttagtttgggtgatagagtaagattttgtttaaaaaaaaaaaaaaagaaaagaaaaagaaaaggaaaaaatgttttttttttttttaaaatttttttattttaatatttaaaattattttattttttttttaaaaaagttatatatgatatggtttaaaatattaaatatagatggtttttgatttatgatggttttatttaagattgtttagttgtgatggcgtgaaagtagtatatattttggaagaaatgtattttaaatttgaaatgttagtttttttttgggttagtgatatgtggtataatatttttatttgacgttgagtagtagtagtgagttatagtttttagttagttacgttaatgtaagtgttttgagtatgttgagggtaggttgggttaaattatgatgtttgataggttaggggtattgaatgtatttttaatttgtagtttattaggatataaatttatttgaagttaaggagtatttgtatttttatagggtttgttatgtaaaatagttgattatattgtttttttatttttttttttagatagaaattttagtagatagttttattttataaatgagaaagtggaggtttagggaggttaattaagatacgtaagtttatatgggtaggaagcgatggagttatgataagaatttaaatttatatggtttttaagtttgaggtttgagttatattgtttcgtgattataggatatattagttttttattggtgttgtaataaattattataatttagtgttttaaaataataaaaatttattgttggatagttttggaaattataagtttaaaatgggttttgttaaattaaattaaatttggtttaaagcggtttttgtattttgaatttttacgtagtatattgaaatttaatttaatgtgtaagaaaattgtattttaatttaagagtatatttttgtaataaatagttgagttttaggtaaatatagtagttaagttttaggtaattataggttgttaattgattagattatgattaaataaggtaaatattgagttgtaaataagttgtttttgtatattattttttttttttttttataaatattgtttgtttttattgtttagtggagttttttgtattttttttggttttggatgttgtttaatttatgaattgtgttttgtttaaataaattaaaataaattttatttgtttaaagttttttttttaatatttgtatagggttaattaaggtgttagtttgtttgtgttttttttttgaaggttttagcggataatttgtttttgttttttttagtttgtagcgattagttgtatttttcggttgatgtttttttttagtaattatttttttttgatttttgtttttaatattatattttttttttttatttttttgttttttttttttatttagaaggatttatgtaattatattaggattatttggttaatttagaataatttttttattttaagatttttaatttaattattaatgtaaagttttttttgttatgtaaggtaatagatttataggttttatagatttagattttttaggggtggtagttgggggtattattttatttattatatagagtaaagttttatttggatgatttataggttttataaatataaaatgtttaatatggaatgtttttttaaattgtttttttttgatgattggaattattaattatttggttttttaagtattttttgttttcgttttttttttttttttatatataatggatgacgatatattatgttgtatttgtttttttatatgtttttgattttttttttagatttttgattttattttaattcgagttttattatgtttggtttgtgttattttaatagttatttacgttgttttttttgtttttaattttatgtttttttaatttattttttttattagagtagtttttttaaaacgtgaagttgtttatgattttttttttattattagtttgtatattggttttattgattgtagattaaagatttaagtttttagtttggtgtgtgaggtatttatttttagttttttgttttatttgttatttatttattttattaatttcgaaagatttttatttttttcgaagtttgtttaagtgtttaagtcgtttatgttttgttagatttggaagttattttttatatattttcgattagtttgaatgttatttttattagaaaatttttttaattgtttgtgattttaatgttttaattttatatatatttttgttgtgtttttttgtttgttaatatgttttttgggtggtaagtaggatttcgtgttttattaatatttttcgtttttagaatttagttattgtttgttatataagtgtataatgagttattatattaatattatgtagttatgttttttgtatagtagttttttggattttatggttttttttttgatttgttttgtttgttattaatttttattagtaagataatttatttaatttttgttttttttgttatattatatttttagggtaataataaagttgttaagtttatgtattttttttatttggagtaaggttttattatgttaggttttcgtttgatttttttttttgtttgggatggtagattttgttttagtgggtttttaggtcgtgaggttttttgttttttatgttttgattcgggtggtgagttgtagtttattataagtttttatttgtttttgttggtttttagagattttgtatttaatttggaggaattatttttgatggattgtaagtgagaggattttttggtttttttttggagttcgttagaaaattatattttttgttttttagcgttgattgtttatgtttacgtaatttttaagagtaagagtttatggattgttttggtagtaaagaattcgtttaggattttgtttgaagttgtattttcggggtttcgttttattagaagatttttttatttttattatcggtttagcgatgtatgggtattttttagggtttagttttagaatgtattgggggaggggagggtaaagtaggtggggaaggagttagagtcgtaggttatttgtggttggagttttgtatttttaataaacgggaaatgaattgaaggaagattgggtttttacgttaatacgaaggatattattacgatgttagattaattattaaataaaattttagatggaaaaaatttagaaatttaatttggaatttgagtttcgttttattatgtaacgtttttagttattgtttcgcggatgtaatgtggatttttatcgttagatggcgatcgagatcgtaatttaagttggtttttttaattttttttggattgagttttcgtgaaaattttaagtttaacgaggggtttttttcgcgtaattttcgtttttgtttttttttttatattattttaatttgcgagattttgaaagggataatgagggttggggggaatatggaaatttagggaagggagaggggggtggtgtgaagttttttagattagttatatagaaatagcgtattaatagtggtttagagtatagatttttagttagaatgagtaatttaaatagttttacgatgtaatcgttgtgtgtatatgtatttttatgtttttttttttttttgttttttttttatttgagatagggttttattttttttgttttataggttggagtgtagtggtgtaataatggttcgttgtagttttgattttttgggttttagtggtttttttattttagtttttgaaattatagggttttgaatttttgggtttaagtgatttttttgtttcggttttttaaagtgttggggttataggtgtcggttattatgtttgtttgttatttaagtgtatagaagaatgtttggtatttagttagtgttaaatatttataaaataaattaaaattttataatattatatatatgttgttgagtatgttataaatagagatatatttaatgagatgttaatatatattacgttaatgaattaagtaagtttgagaatattagagaagaatgataatagattaacggaggaggttggcgtagtggtttatacgtgtattttagtattttgggaagtcgaggtaggtagattatatgaggttaggagttcgagatttagtttggttaatatggtgaaattttttttttattaaaaatataaaaaaaaaattagtcgggtgtggtggtgtgcgattgtaatttttgttaatggggaggcggaggttgtagtgagaggagatcgtattattgtattgtagtttgggcgataaagtaagattttattttaaaataaataaataaataaataaataaataaaaaatagacgaaatagggtttgagtatgtagtttgtttttaatatgagatagtaaagtttttgttttttttatattttgttaattaatttatttgatgtatatcgatgtataaagtttttaatttttatttatttttttttttgaaaagtatgcggaatgtttttttaggatttttttattttttatttgtgaatatttattggtattttcggatacgaagtttgtaagaaggtgtgaatcgttttatattcgtgagtttttggggttttgtattttttttagtttatatttgattttagttaatttttaaatgattttagttaaattttttttattagtgtttagttgtatttgttttaggtaagtaagtatttaggtaataatttttttagattttaagttagttggaagtttaattttagttttgtgatgggttgaaaaaaattgcgattttgtaatttgtgtgattttttttatgttgtaaggaagtattattgtttttagttttttgtatttttaagtagaaattagaattttatataaacgtttttaaatggagatattgagaaaaagtattcgagaaattaatgagatataggaagaatgtttttagtattaatatgaatggggtttggttatatagatagaagggttggaaatttttacgttttgatttaaattttttatgtatattttgagtacgttggggaatgtattattattaggtttgatttggatttatggttattattttttataaaatgataggttttttgttttagtacgtgagataattttttaatcgattttattgttgttatttttgttaagtataaataatgatttgggttataaattttaatggggtttaaatttttttgtgtattttaataggtaatttttttattttgggttatgaatttgttattgttaagatggatgttatgaaaaaaagagattttattaaaatggttatagagagatggagggtttttgtgtagatggtagggtggtggtggtcgtgtaattagttgttcggtgaggagtagtttttggggagagtttaggtaggattaggagaagtagaaatagagaaaagtgaaagatcgaggtggaaagaatatgagggataagagttttgtatggttatattattagtagttttgttattataatgaggatgaagggattgaaaagaggggaagagatggaatttattaaataatagtgtttatttatataaggtaagtatatatgtggttttttttttttttatttgaagatgtggtttattgtaataggaattattatgggtattggacggttgttttatggtgattttatttttttttatattttaaatttttttttgaatgtatttttgtattttgattttttttttttttaaagtttttgttaatttttgagtatgatttagtttttttattttttgaaatatttgaaatttttaatttttttttttttgtggtgtaatttatatggttttttgatattaggaggtattgtttgtatataattttatattatgaggatgaaatgtttatgaattttattaatttgaggaataacgtatttgttttttttgataaaatacgggtgttatatattttgtaggaaaaggtggtgttgaggttagaatttttttgtttttttgtttttttttttttggttttggaaatgttgagaatatgagtgaagggaaaaagatgggtattacgtggaggtaattttatggtggtatgaaataattttgggggtatgaatgttatgggtagaatattagggttttaaaagggaaatatatagtattttttttggattttagtgtttttttttatagtaatggaaattataagcgtagaggaaggggagttgattttataaaaagaagtttattttttattttaaaagatgattttttgattatttttttataatagagttagaggattataggggaaagttacgatttttaattatagaaaatgatgttgggtgtatttagtattatagaagttttagaggatatagttattttaggtatttatagataaggaagaagtattaatgagagtatttattcgtatttttatttatggaagcgaatttttttaggaattaaattatttagttgttggtagatgttttttttggttttttttttttttgagtttttaaatatagatttttttttttgtgtgtttttgtttttggtaattttgttttaagaataagaatatttgtttgtagatgagtttgttaggtcggggattttttgtatagggagatggtgaattattgagtaggatatagaggtatgagttgaaatagtgagatgtattttagtttaaagagaggttataagagtttatggattattattagataaattttaaattagaaaaaagaattatattttttttttgatagttatataaaaattgaagttatatttattttaataaaaagtaatatgtatagttttttattgtaaagtttatttattatttataataggtatatagggtttatattatttttatagaagtggaaatagtatgtaattattaatttagtttatttattagttttttaaaagtgaaataaagaattttttttttgattttttatttggtaatttgaaagagataaatttgtgattaaaaagagtattttatattatatataaataattaatgtaattgattgatttaagttagtgtgtgtgatattgtgatataataggaagtatatatttggtttttgattttggtttttgttttttagtttttaaaatttttggaatttttagagtgataagagtgttttttgtatgttaatgaggtgattggtggttggggttggttattagaaagattaaggtaggattagagggttgggatttttatttatttataatttttggggagaagggaggggttgaaggttgagttgattgttaatggttaatggtttaattaatttattatgttgatataataaagtttttattaaaatttaaaagggtagagtttggagagtttttagatagtagaatacggaaagatgtttggaggataggtttttgaagaaggtgtggaagtttcgtatttttttttttatattttgttttatgtgttttgtttttttttattaatttgttcgtttgtattttttgttttattttatgtaataaattagtgtatgtaagtaagtgtttttttgagttttttgggttgttttagtaaattaattgaatttgaggaaaggtttgtgggaatttttaatttataattggatggttagaagtataggtgatagtaattggtatttgaagtgggaagggggtagttttgtatgattgattttttaatttgtgggatttgatgttatttttaggtaaatagtattagaattgaattgatttagaggaattcggtgtttgttggagaattgtttggtgtgggggaaaaatttttatatatttgatgttagaagtaattgtgtaagatagaaggaaaaatgttttggagttttttgttttttttttttatttttatttatataggttaaaaatgtggttgggtgtatgtttatgatttgagtattttggaaggtttaggtaggaggataattagaggttaggagtttaagattagtttaggtaatatagtgagattttttcgtatttttaaaaaataaatagagataaatatataaataaattagtataagtataagttttataatttattatgaaagtgttagagtgatgaatgttatgggtatagtaatagttaataaagaaaataatgtgttggaggaatatttaagataattgaggttgttataagtaaaattatagaataattttattatatatatttttttttgtttttaaattagatataagattaagttttgggtttttttggtagtggagggcgattttgatatttatatataattatttatagggtatggattttgagagatgttgataaaagaagttggtgtttttttggtatttgtttttaaggattttttaatatttagagaatttgtatttatatagattatgtttttttgggagttttttttgattgttttttatatttttattcgtggttttttttttttgattttttattttagtttttatatttgttaatattgtgtttattattatgtggagtggttagaagatttttttagagttaagatatttttagggttattttttttttaggtattttttggtacgattgttttgaataaaggaaaggagatgaaggtgatgttgagaagtatttagagggttggagttagggggaatcggttgaggttgttggattaagttttagttattggtaaaagatttttaagttgcgaatgttattgttatttgtgtaaagtcgttttcgagattagaatatgttaaagattgaagaaagaggtttaggtagtataaagttattatgtaattgaagtttttttcgtttttaaggataggaagcgtgtaaatggttttgcgtttttagtaggggtggggttaagaagtgagtttgtaaatggtagtttgggcgaagatttgtgtgatgtatgtagggatttaaatttagtgttttttgaatataaatattttttatgattcgggttaggtatcgtttttgtgaacgtttaaagaatatttttatattttgaggggatatcgtttattattagattattgttgacggaagttaggtgatagttttgtatttcgtgtttttttttttagtaatgtaaaaatagaagttatttttttttttttttaatgtaggatttttttttttgagagggtttttgttatttaggttggagtgtagtgatataaatatagtttattatatttttgattttttgggtttagatggttttttcgttttagtttttttagtagttgggacgataggtatattttatcggttcggttaatttttttttaaagtttttgtagagatagggtttttattatgttgtttagattggttttgaatttttgagtttaagcgatttttttattttggttttttagagtgttgggattataagcgcgagttattatatttagtttagtgtaggaatgtttaatttttttatttgttattaaagaaaattgttaatttttttattttttaatttttttttttttatttgtttttttttaggttttgtttttgggtgttatttttttagttttgagaatatgaaggtttgtttagaaaaaaaaaagtagaaaaaatttattggaagattttatatttgtatatatttttatgaaatgtgatagtgaagtgttagggtagagatatttgatttgattattattaggataaaattaaatttttttattatgttttatatgtgtatttgtttaattttgttttttataattgtttaattaattcgttttgttttagttttattggtttttttatttttttacgaagtttatattgttttttagagttttgtatttttttttgtttggaatgtttttttagattttaatatgataggaaaataaaagataattgtttgttatgtttattatagttttagttttatgaggtagagtttatgtttattttttttttatgtaatatttttggtatttagagagtgattgatgtataatggttggtaaaatatttgattaaaaaatattttagtgtatttttttttttaaaatatatatatataatagaggtagttattttgtttatatttttagtatattttaggtatttagtaaatttttgttgaatttatatggaattttttagattgatttgtgaatattttagatttgaaaaaggagaaaattataaaattaagggtaatggggagagagtaaaattaaaggtagatatgggaagattttttttatataaaatattttttttatgtttataatgaatttttaaattatttggatatttataatagtggtagtaagggaatgtttcgttaatgtaggttttttattttttttaattaattttaggtttttaattgtgtatgatatatgaaatataaagggtgtttatttgttaattattagtattaattaatttaaagatttatttgagattttgtttgcgtaataaaaattaaaaagattatttagtaatatattgggagaggtgtaattggggtattaaaatacgaatgtgtgtttaatttttaaatattataagtattttgaaagtatttatatataattaattaatatatgttgttaattaaatttatatgaataatatgtgatataaattagtgttttgtattaattttaagataattagaaagagaatgttattattatttttttgatttaattaatagtttttagattggttttttgtaatgaatttaatgggttagtaaaagttgtgttatttgaaattatgtaattttgtttttttaatattttgtttaaatattttttttattagtgtaaatgattgaagtattatgtaaattttaatattgattatttaaggtatattattaaaataaattatgagttgtgattttgggtaaggtatttaaattgaaagatgttttttttatttgaaaatttagataataataattattttatagtttgttaagaaaagtatatgtgataatatattttaatgtataatatgtttggtatatattaaggtttaaaaaggataattgttattgttatattaataaatataataattttgataaatataatagtaatttaaatatattttttttaatatttattttaagtttaggggtatatgtgtaggatgtgtaggtttgttatataggtaaatgtgtgttatggtggtttgttgtatagattattttattatttagttattaagtttagtatttgttagttattttttttgatgttttttttttttttattttttattttcgataggttttagtgtgtgttgtttttttttatgtgtttaagagtttttattatttattttttatttataatgagaattataaatttataatttagtttttatttataaatgagaatatatgatatttggttttttgtttttgtgttaatttgttaaggatggtttttagttttatttatgtttttgtaaagaatatgattttatttttttttatggttatataatgtattatattttttttatttagtttattattgatgggtatttgggttgattttatgtttttgttattgtgaatagtgttgtaatgaatatatgtatgtatatgttttttataatagagtaatttatatttttttggttatatatttagtaatgagattgttgggttaaatagtatttttgtttttaggtttttgaggaattgttatattgttttttataatggttgaattagtttatatttttattaatataatttttttagtatttgttgtttttttattttttaatgataattatttttattggtgtgagatggtattttattacggttttggtttgtatttttttaatgattagtgatattgagtttttttttatatgttttatggttatatgtatgtttttttttgagaagtatgtgtttatgttttttgtttattttttaatgggtttttttttgtaaatttaagttttttatagatgttgaattgtagatttttgttagacgtatagattgaaaaatttttttttattttgtgggttgtttttttattgtgttggtagttttttttgttgtgtagaagttttttattttaattagattttatttgttaatttttgtttttgttgtaattgtttttggtttttttattatgaaatttttgtttatgtttatgttttgaatggtattgtttaggtttttttttagggtttttatagttttgggttttatatttaagtgtttaatttaatttgagttgatttttgtatatggtgtaaggaagaggtttagttttaattttttgtatatggttagttagtttttttagtattatttattaaagagggaattttttttttattgtttgtttttgttagatttgttgaatattagatgttagtaggtgtgtggttttatttttgggttttgtattttgttttattggtttatatgtttgtttttgtattagtattatgttgttttagttattgtagttttgtagtatagtttgaagttgggtaatgtgatgtttttagttttgttttttttgtttaggattgttttggtttttcgagttttttttttggttttatgtgaattttaaaatagttttttaaaaattttttgaagaatgttaatggtagtttaataagaatagtattaaatttataaattgttttgggtagtatggttatttttatgatattgattttttttatttatgagtatggaatgttttttattttgtttgtgttatttttgatttttttgaagagtgatttgtagttttttttgaagaggttttttatttattttgttagttatatttttaggtattttattttatttgtggttaattgtgaatgggagattatttgtgggtaatttaaatttttaaaattaaatattttattatttattatgtattatttttttttgggatagatagagattttttagaatttcgataagttttattttaatttatttatttttgattaatttgttttatttttcggttgttattgtagtaattggggttattaatagttttagagttattaagatttttttgtaaaattgattattttttttaggatagtattttttaaatggttatgtaagatttatggttaagaatggaagtagttgattaaataatttaatgagttttatttaattatttattttttatagtttttattttgttttttgtggaagtatataatagggtttagttttggtgttgtagttttttgttagaatacgtaattagtaggttttatatataaaattttattttattttaatattaattttattaaatggaagttatttaaattttaaagttaaaatgattgaggttaatagagaatatgtgatttgttgagggttataaatttaacgaattttttaattacgggataaatgtattttttttaaaatttgttattttttatattatattttagtgttttatagtgttaagataaggaaaaaatgaataatttttagataattatttttttttttagggaatatttttttatttttttttttttattttttttttattttttttagttatagttaaattttaaatataagaattagagaatttaaataaatgttataagaagaaatattttgaatcgtgttttttttttggtttttgaaatttttaaatatatttttagcgttattataaagtttagtgatatttaggaataatttagtgttggatattaagtagatgattaatgaataatttttgtatttttagtagagacggggttttacgatgttggttagtttggtttcgaatttttgattttaggtgatttattcgttttggttttttaaagtgttgggattataggtatgagttatcgtattcggtttagaaatagattttttatttgaaatattagaaggtagaaaataataagagggaaaaaaggttgttaatttaacgtatggggaagtagggtgtgggtaggaaatgtagtgtaagagaggagatttgtatagggcgatggaagagataatggagagaagataatttgagtagaagttgtgaggagtagatagatgttggggaaagggattgttaattatggtgttattttaaaattagttttgtgtttaaaatttttattgtaatatttttagagatttttattgtattgtaaaaattttggatttatattttgtttattttttggtgtaaaattgagttgaagtatattgattttattagaagaagttaatgttttaggaagatattgatagttgtagggatgttaattgggttatttttattagtaggtggggatattgtattttaaaaatttaagggagttgttgttttttttttttttttggttttttggtaggtttagatttgagggattagtattttttgagggtggtaatttagttattttttttttttttatttttttttttatgtgtttaaaatatgatgtaatttgagatgtggttatgggtgtttgagaagtaaagaagtatgattggagtaggagttaaagtttgtttttgtttgagaattgaagagtttagttttttatacgtttttatagataagagattggtattataaaattatatgtttaaaataaatttcgttgttgttattttaatgtaagttattatttttttttatattgagtattttgttattatttgtagtatttttgatattttagtaagaattaaattttattttgtaattagtattttaaatttattaggatatttgtatatagtttgaggattaaataataaagatgtattttaatgaaaataagagttttttatgttattttttttttttattagtattatttttaggttaatgatttttaatggtaatatgtgtatttttgtgtatgtggggtattaatttagatattagttatttaattatttgaaagtagataatttagattattaataattttatgtttttggtattttttttgtaattttattatattattatgtttagtttttttgtaggtaatttttgtatttaaaaaaaaaataaagaaaatttatatttaagtatattgtatttaaattgtaaaaaaagttgaaatatataaatattgtttagaaaagtaaagtgggatgggaaaagtataagttattatattttagtatattttttaaaaatgaatataataggtagatatttgttagtatgtattataaaatttgggtaatatagttatgaagtatatttggatattttttaatatatatattatataaaggaagaaataaagtattgtttaaattaatggattaaataatttagttgaaatattggaaagtagatgaatagtaatttatagaagaaatttaaatggaaaatagtatatgtaaagatggttaattttttttataatatttgatatagtaatattatgttattttagtttaaataaaattatatattgataaaaatgtgaaattacgtttttgaggggttattaagaaattgtttagaagtattgttttagaagttgatgtggttttggaagattaagtgtgaatgtttaaaggtatttttgttgaataaaacgttaagtggaggaattgaagatttttgattgtggaagtatttaattgtttagaatttaattgaaattttgaatgatagttttttatatgtagtaggaggagtaagtgatttatggaaataacgggtttatttaaataaagatagtttttatgtggatattaaatttattaatgaatgtatttatttatttgttaaataattatttagtttttattaagtgttatatgttattttagataatttagttaaaaaggtaaatgtgtttttatttttatgagttttaattttagtaggaattaaaaaaagttatataataaatagatataaaatgtagtgttaggttgtgatttttgttatgaagttataaaagaggaaagttgagtaagggaataaagaaataaagtgtttattagtagtgaatttttatgtaggttatgataggtttattttaaaagaagtagaaatatttttattattgtttttttgggttattagtgttatatgtaagaatagtgtattagatttattattatagatttttgtatttatacgttattttgaataaaataataacgtttagatagtttttttttttttgtaagaattaagtgtatgtaagtttttttttttgtaatttagtttattttttttatatgtgaggattttagatattattaggatgtttttattgttaattggattttggaaaatatatttttttgttttataaaatatatttttttttaagttttagagtaaattttgaaatgatttatttatggattagttttttgattttaattagtattattattttagttgtaaaggatatttatttaaattgtgtataggtaagattatttagggggtatagtttagagtatttatataatttttaatagattatgtgattttataagaatttattaagttaatgttttaagaatattgataattatttttagacgttttgttgaaaaaatataaatagatagggagtttatagtaatagggtgggtttaaagttatgtagtttgagtgaggatatgggatgttaagtttagagataggttatatgtagatagttagaataatgttttaaaatttataaatggttgggtttggattagtaatttttatgtgaaggatgttagaaatgagtaacgtaaattttaatagagtttgaaaatatattttaaggtagaggttagaatgaatttatttgttattttagtttgatatatatgttagaatgggttatagaaatgggttaataggaaaaaagttattgaaattatggaaaagatcgaaatgaaaaatgtgagataatataaaggtttatatatgttatttattttagtaaaatgtaaatagatttgatttgtgattaaaagatagagattgataaattgaatgtaaaaatataaatttagattatattgtttataagatatatgtttaaagtataaaagttattttagagattgagtgtaaaagatagaaaggatatattatgtaaatattaattttgaaaaatgatattaatttattaatgtaaaaaataaattttaaggaaaaaaggtattgtagatttttttttatttttttattttgagtttgtgtgttattgtatgtgagatgagttttttgaagatagtatattaatatattttggttttttatttagtttgttattttgtgttttttaattggggtatttagtttatttatatttaaggttagtattgatatgtgtggatttatttttgttattatgatgttagttggttaatttgtagatttgtttatgtggttgttttatagtgtttttgtagtggttggtaatagttttttttttttatatttagtgttttttttagaagtttttgtaaggtaggtttggtggtaatgaatttgtttagtatttgtttgtttgaaaaggattttattttttttttaatatgaggttttatttggttaattatgaaattttgagttggaattttttttttttatgaatattgaatattggtttttaattttttttgtttgtagggttttagttgagaggtttgttgttagtttgatggatttttttttgtaggtgatttgatttttttttttagttgtttttattttttattttttaatatttttttttttattttgattttggggaagttgataattgtgtgttttggggataaaagttttgtgaagtattttattggggttttttatattttttgaatttgaatgttggtttttttagttagattggggaagtttttatggatgatattttgaattatgttttttaagttggttttattttttttattttttttagggatattaattagttatagatgtggtgtttttatataattttatattttttagaggttttgtttattattggggaagatagtgtggagattttttaaagatttaaagatagaaatattatttaatttagtaattttattattgggtatatatttaaaggaatataaatttttttgttataaaggtatatgtatgtatatgtttattgtagtatatttataatagtaaagatatggaattaatttaaatgtttattaatgatagattagataaataaaatgtggtatatatatattatggaatattatgtagttataaagaaataaaattatgttttttgtagagatatggatgaagttgaaagttattatttttagtaaattaatgggggaatagaaaattgaatattgtatgtttttatttataaataggagttaaattatgagaatatatgaatttataaaggaaaataatatatattggggtttattagagggtggagagtgggaagagggagaggattaggaaaaataattaataagtattaggtttaataattgtttgataaaataatttgtataataaatttttatgatataggttatttatgtaataaaattgtatatgtatttcgaatttaaaataatagttaagaaaagaaaataggtcgggtacggtggtttacgtttgtaattttagtattttgggaggtcgagacgggcggattacgaggttaggagatcgagattattttggttgatatagtgaaatttcgtttttattaaaaatataaaaaattagtcgggtatggtggtgttcgtttgtagttttagttattcgggaggttgaggtaggagaatggcgtgaattcgggaggcggagtttgtagtgagtcgagatcgcgttattgcgttttagtttgggcgatagagcgaaatttcgttttaaaaaaaaaaaaaaaaaaaaaaagaaaataaataaataaaaagtaaattaaaaataaaagttatggttgaattaatgatgatattgaggaataaaataagtattaggattatgatattagtataaagttatttatgagggatttgtttttatggtttaaatattttttattaggttttgtttttaatattggggattaaattttaatatgagatttggagtggataaatatttaaattgtggatgggaatgtatgtggaagaaatatttaatataattgtatttaaaaagtagagagggtaaaatatgttaatggtattagagatacggattgtattttttatttaaagtggtaaaatattaatattagtagattgtgataagttatatgtatatattgtaataagtataattattattaagaaagttatatgaagtaatgtattaaaaaggattaaaaagtatgagtgtagatataaaagttttttttgagaattttaaataagatagatatgtatatggtgagtagggttgaagttttgatttttatgtttgaaagtaggtattattggttgggaatttaatttttaagtgggaaagaaattaaaagtgttttatggaggaaagatagttaaattttgattttttgtttttggttaggagttgaggttgggttttttatgattttaaaggaggttgaggagaatgtttttaaatatttgtatgttatagatataaggaagtgagaagatatagaataatttttttaaaaggaattgaagtaaataaaaaataattgttttgagaagattgttattgttttagatattataataggataataaatttgaatgattattgaagaattgggattttgattggaagtttgatgggttgaggtggagtggttaaataaaatttttggatagggatagtggagtatagaaaagaagaggagggaggagagtaaaagagatgggtaatgttatggtttgaatgtttattttttttgaaatttatattgaaatttaatttttatagtaatagtattaagagggttgtaaatttaattatggtatttgagaggtggtatttttgggaagtaattaggattagatgaggttttgagggtggggtattgagaggagaaatagagattttgagttatatttttttgtttttttgttatatgatgttttgtattttattagaatttagtagagggtttattaataagaagatttttattagatgttggtattatgttttgggattttttattttttagaattataagagatatattttgtttttttataaattatttaatttttggtattttgttataagtaataagaaatagattaaggtagaaaattggtattaaaaagttgggttgttgttaataataaatatttgaaaatgtggaagtagttgtggaattgggtaatgggtagaggttaaaagaatttaaaaaggtaggcgagaaaaagtttgtattgttttaaatgttaattttggtgataaagggtgattttggtgagggtttagaagaagttaagaagattaggaaaagtttggaatttttttgtgatgatttgagtggttaggattagaatgttaatagaaatatggatagtaagggttgttttgttgaggttttaggtttgaggaataaggaattggaaattggagtaaaggttatttttgtaataaatgggtgaaaaatttggttttgaattgtgtttatatttgatggttttattaggttatatggtagaagaaatatttaagtagtaaagtagttaggtagttgtatggttatttttaattgtttatattaaagttgtgagaggtaaaaaataatttaaaggtggaatttataattaaaagggaagttaagtggaaagattaggaaattttgtagtttggttttgaaagagtatttttaatagaggaaattaagggtgtgtttgaaggaatgattgttaaggagggattgattgataaggagaattgtatgaatagaataaagttagaagttatttattaagataatgggagataaatattgaatgtattttagagatttttaagtttatttttgttattataggtttagagttttaggaggaaagaatggttttaggagataggtttggggtgttttttatgggtttgttgtttaatgttattttagggtagtgttttttttattttggttgttttagttatagtttaagtggttttagatgtgatttatattgtagttgtagaaggtataagtagtaagttttggtaatgtttatatgtatgtggtgttatttttgtaggtttttagaatgtaagattagtgggaaggtatagaaatttttatttagattttaaaggatgtattagattgtttgggaatttaaggagaaaattgttataggggtagggttattattgtggggaaaagtaagagggattagattgttattgtgtttgtgtagaaagaagtagatataggagattttattttgttttgtattaagaaaaatttttttgttttgagatgttgttaatttatgattttatttttaatatcgtgttttttgaaatatgtgttgtgtcgaatttagggttaaatggattaagggttgtgtaagatgtgttttgttaaatagatgtttgaaggtagtatgttttttaagagttattattattttttaattttaagtatttagggatataaatattgcggaaggttgtagggatttttgtttaggaaagttaggtattgtttaaggtttttttttatgggatagtttgaaatatggtttcgtgggaagggaaagatttgatcgttttttagttcgatattcgtaaagggtttgtgttgaggaggattagtataagaggaagatatgttttttgtagttgagataagaggaaggtatttgttttttgtttatttttgggtaatggaatgtttcggtataaaattcgattgtacgttttatttattgagatagggaaaaatcgttttaagattggaggtgagatatgtaggtagtaatattgttttgtaaagtattgagatgtttatgtgtatgtatatttagagtatagtatttgattttttattttgtttatgatgtaaagatttttgtttacgtgtttgtttgttgattttttttttattattgttttgtgattttgatatatttttttttttgagaaatatttacgaatgattaataaatatgaagggaatttagaagtcggcgggattttttatatgttgaacgttggttttttgggtttttttatttttttttttatattttgtttttgtgttttttttttttttaagtttttcgttttatttaacgagaaatatttataggtgtggaggggcgatttatttttttaattattaagagtttttgttagggtaatgttgagaggaattgtggggttggaattgttatagggagttttttttagggaaatatttagtggtgttgtgatagtgggattgttattaagattttaaaattgtagagttattagtatgtagttttagtttcgaaaatttaaggtatttgattttaatttatgagaatagttatatatgggttgtaattagtaaagttatgagggtagggttgtttgaggttttgggggtttaatttttgtttttgtgtgtttaggatgaggaatatggagttaaaagatattatttttagttttaaaatttaatgtttttttttgttgagttttagatttttttgaggtttgttattttttttttttggtttattttttttgttttagtattgtattttggaggtagataattggttttagtattttaggtttatagataaggattttggatttttggatttttgagttggtattagagaaagttaagattttggggttttggagataaaatgaatgtatttgaatgtgagaagaatatgagttttgaggttgtaggggtgaaatgttatggtttgaaagtttgtttttttaaattttatgtagaaatttaatttttattgtaatagtataaaagggtaagaaaatagattatgatattttaggggtgggagatgtgagaagtaattagtattagatgaggttatgaggatggggtgatgggttattaagggtttgataagaggagaaagagatatttgaggtagtttttttagtttgtttgttatgtgatgttttgtattataatgggattttgtagagggtttttattagtaaggaggtttttattagatgttggtattatgtttttggattttttagtttttagaaataaattttgattttttataaattatttagttttaggtattttattgtaattattaggaaattaattaatatagtaaaatcgatatttagaatataaaataattttagtattttgggaggtcgaggtaggcggattatttgagtttaggagtttgagattagtttggttaatatggggaaattttgtttttattaaaaatataaaaattagtcgggtgtggtggtatatgtttgtaattttagttatttaggaggttgaggtaggagaatcgttttaatttaggagatggaagttgtagagtgagttaagattgtgttattgtattttagtttgggtaatggagtaagattttgttttaaaaaaaataataataatatatagtaattggagatgaaattaatttaagtgttttggtatatattatgtaagtatatgaagtataaataagtagagtgtagatgatattaataataatgattttattgttattttgttttagtgaagaaggggttttgtaggtatgattaattatttttttaggtgtgtttttttaatgttagtaaagttaggtgtgggtgaaaaaaatattatttagttttttttgttaagtgattataaatattattagatttttgtgtttttttgtttttatttttagggatttaatgatatttatatatttggtttttaggtgagattttaattaataaattaattttatgattgttagtaattataattagatattttgttaagtttttaatttttatatttttaagttttgtaatttggtatgaaggtattgcgaatttggattttgagttaataagatttagataggatattggttttgatttgaggttgtaatggaatgagattttggggggtttttgagaagggattaatgtattttatatttgagagggatatgaattataggtggttagagggttgaagaggtgagaaggaaagtagaattttaagatggtttttaggaatatttattattttttgttgtatatattttataaaattatttttttttaaatgtgggtggaatttatcgagattagtttcgttagggagattttaatttagtagcgttagaggaattaaagatatatatatagaaatgtagaggtgtgaagtgggaaattagggattttatagtttttagagttgagagttttgaatagagatttatttatatatttattaatagtaaattagttattagtattgtttttatagatattaaattaattaaaagtatttttatgggaaacgaagggatgggttgaattaattgtagtaggaatatgtttttaagatatagattgtttatgtttttgtttgtggtttaagaatgtttttaagtggttttttgttttgggtaggttaggtgttttttgtttttattttcgtaaatttataattttttagtttgggcgttaaggttattatggatatgttatagtgttgtagagattttatttatggttagtttatggttataaattgggttataaatttggggttagtttatggttagattttggggggtttgtttttaatagtaattagtaaatttaatggtatgattattattgtgattgggttatgttttgattgtaattagttttatgaaaaggaaattattgtaggtgagtatgaattaattaggtgagtttttgaaagggattgaattttttttgaagagggagattaaatatgagaaagattttgtattattgattttgaagatgtagagggttatgtggtaaggaattgagagtggttattgggagttgatattgatttttggttgatagtcggtttgaaaatatggattttagttatacgtggaaataaattttgttaataggtagtgagtttggaagaggattttatatttaaatgagaattataaggttagtttgtgattttagttttgtgagattttaagtagagagtttagttgagttttgtttagatttttgatttagaaaattgagataataaatgggtgttgttttaagttgtaaagtttttattaatttgttatgatagtggttagaaaattaatataatatgttttgtttatttaaattttatatattgtattataagtatttttgatataaatagaatgtttaaaattgatatattttttatatattaattttttatttttttttagtatagtttaagaatatttttttgtacggtttttttttttgttttgttatttaaatttattttattattttttaataaaataaatatttattttttttttttatatttttgttgatggtttttatgaaatttcggtttttgtttttttagtttaaaagaatttaaataatagatatatagtaaaggagatataatatagagtaattttttgtaaaggagaaaggatattttgaaagttaggtgtagaattaatagtatattttaagagataatttagggtaggttgtttgtgcgggtgagatagtgttgaatgttattggggaaattttttttatgggagttttatatgattatttataagggggtgggaagatgtgttattagtaagtatgttttgggtggtttttttttagttttgagtttttttttatttaaatttttaatttgttttagtataatttttgtatgtgtgtatgtatgggttttttttattattttattaatttattaattgatttaatattatttttagtaattttttttattttattggattaaaagtttgttttattatgtattatatttttaatttatttaatataaatgtaggataatttgttttatttttgaaagtagttttagtatgatgttttttagagaggttagagtaaatttttttatattttattttaaatattttaaattatattgtaattttttgaaaaatattaaattaggattgtatttttaatattaagaaaaatgatttaaaatttttttaaaatagttttttgttttaaaaattttattataatttttttattattatgttgtttttttttttattttatattggtgttatgataattaagtatattttaaaaaatttgttttcggattttttatattttattgagttttattttttattagttatagtttattattttataaatttggatagattttagaagagtagagtgggtttttatgtattttgaagaagtgaagaatataatttgtaatattgaaggttttttagaaatatgtttgttttttattttaaaatttttttaaagggtttgcgattttttagaaatgtaatatagtggtttttttttatcgatggttttattttttatagttttagttattggtggttaattaattatagtgtgaaaatataggtgtttagtataataagatattttgagaagaggggagagagaaagagatagagaaagagagagagagattttatttatataatttttattatagtatattgttataattgttttattttattattagttattgttgttaatttatgattgtataatttgtaaattaaattatattatatgtttgtatgtgtagaaaaatatagtatatatagagtttggtatatgtttttaggtattttttggggtgttttgtaatatattttttatggataagagggggttattgtaaataaaatttttaattttattaattgtggtataaattaggttttgtttatgtgtagttaatattattttatagttgttttttttttggggtattatgaatatgttttaattgtttagttttataattatttgtaaatatttattagagtatttttttttatttttattaatagttgtttttgtatatcgtttttgaaagttagaaatattttgttaataaaattgttttattattatttagattaaagtattattaaatttatgtattttgtttggaaaagtgatataaattgttttgtttaagaaagtggtattattgtttattaaatttttttttgtttttaagtaaatttttatttttttttgtggattgtatatatgattgttttgatattttgtatatttattgttttttttaataattttttttttggaatggatttattgatttaatttgttagagagaattaatgaggttttatatttttttattagttggagaagaaagtatttaatggtttaatttgaacgtgatttttgtgaattttttttttttttttttttaaagtagaattttgtatttggttatattttggtttagtgattattttttttaggtaaagtaagtttttttgtttggaatagttaggtatgtgataaaaaattttttttgtggttatttagttattattttttttgttttgagtgtttgggttgttatttttatgtatttatatttaaatgaagtttttttttttaattttttatagtatgttttgatttataaaatattttagttttatttataatataataattttttataaatgtaaagaatataggtttgtatagttttgaagtaatattggtaaaagagtatgaagtagagtgtttatatttaaatataatttttaatatgttagtttttttataggtgtttttaggataataaaaattaatttgattgatatagatttgggggtaatatatgagaaataggttttgttttaaaggataggatgagaggtgggtagggaggatttgtatggtttgaattttaggtatatacgttaattgttaatttggtattatttattaggttgaatatttttatgaaattttgttttatatttttgttaattttaaaataaagaatgaggattattttaggtgagtttaagttaggagaaattattaaaattgttatattttttatttaatttttttttatgattatttttttttttttttatattaattagaataggttaaattgttgtaataaatagattaaaatgtgtattgtggttgaaatatagtagaagtttataatttattaatgtagtagaaggaggatattgaagatttgtgagttatttttttttaggtggtgatttagaattttaagtttttatagtttaatatggtgttttttatttttttttttgagaaaattaatatattttaatttttttttaagaagggaggtataagagtgattaattgtgatttagaagattaaggtaagaaagttagtgaaatttgttatagtgtttattattatagttgttattatgattgtaattaatatttgttttttttttttataagttatttttgattttttttattttttgaatttagtttagtttgtttttttgttttggtgatagagataattattttagaagggtttatgttattatttattttgtttttgaattatgattgttttagtgtttattgatagatatgattatgtatagaagtattaaaagattattgtatttttatttgggatagtagtttttgttattaaattagaagaataatttagtttttagatttgtttaagtttggttttaaaggaattatttttgttgtagatggattgtggttggtatttttaaatttacgattttatggatttatagtttttcgtattatatggttaatttaaggtatatggttagtgtgttaagtgtttattaggaagaaatgaatatttggttatagttttagaattatgaaaggaaattaaattttgggattttaatttattaagtttaagggaaaagttaatttgggaacggggttgcgaaaattcgtttttttttttttggtttttaaataagatggttataaaatgaaaagttatatgttttttttatattttgtttataaggaaagtttttgtgagttgtaagatttttattttaaggtgtttttgttaaaattttattatggtaatgtaaattggtagtttatttttataggtgtagttacgtttttgtttagaagatataaatgtatattttttttttttttttttttttttttttgagacggagtttcgttttgttatgttggttggagtgtagtggcgcgattttggtttattgtaatttttatttttcgggtttaagtgatttttttgttttagttttttaagtagttgagattataggtatttgttattatgtttggttaattttttttttttgtatttttagtagagatagggttttattatgttggttaggtttgttttaaatttttgattttaagtgatttgtttgttttagtatttttaaatgttaggattataggtatgagttatcgcgttcggttataaacgtatatttaattgttttttttttttcgttttgtttatgttattttatgtaaaaaaaatgtagattaattgagttagataaaggtatgaatgattatttttttttattttttttttatatgaaaattgtgtattttttaatatttttattttttttttttaaatttagagtttttaaaattattttcggagaaaggtatagatttgttttttgggtgtttatttttaattttggtaaataaattttttaaaatgattgagatttgttatttttttcgattgatagaatatatgagtttatgtaaagttattgttggagaagtttttttgtggttgttttttggaatatgtaatatgaatgaagtgattaagagtttgagttgtgatttatattttaggttataatagagtaattggtgcggttaagattttattttttttgggtagtttttttgagttttaggagattgatttataatggagttgaggttttttttgttttttgttattgatttgtaagtaataaaattgttttatataatttgtgtgtgagtgtgttttgttttattagatttagataaataggtagttagtgtatggtggatataaatagtagtttagaatgtagtgggaagaagtatttggatttttttttttggtggttggtatagtgatgattttttttattttttatgtagtggaagttttttttttttttttttggtattggtaattagtaaatttgttttataaattgtgattaatatattaaaatttttaatggaaaaggtagataatatgtaagattagatagttttagtagagatatgaaagttttaaggatgaatgaaatggaaataaaataaaaataaattaataaaaataaagaatgtatttgataagtttattagtaaatgtggtatagttttgggaagaattagtgagtttgaaatagattaataaaaattatttagagtgaaatataaagagagaaagagagtaaaagtatattaaaaaaataagtttggtataatgttttatatttgtaattttagtattttgggaggttgaggtgggaggaatgtttgaatttaaagagtagtttgggtaatataaggagattttgtttataaagagagaaaaattaagtgggtaagtatggtgttggtatttttagttatttaagaggttaagacgggaggattgtttgagttgggggcgagggtgggggatgaagtgagttgtgatcgtattattgtattttagtttgggtaatagagtgatattttgttttaaaataaataaataaataaataaataaataaaggtgatgtaattatttaatatagtattgtagtttttggatgttttgttttgttttttttttgttttttttttttttttgtattttatattgggtaatttttattaggtattttattgaattagtttgttaaaagataaatatattatttcggttggttttgtttttttaatattatattttgaaataattgtagatttaaagggagttattaagatagaataaaaagattttgtatagtttttatttagttttttttaattgtaatattttatataattaaagtgtaatattaaaattaggaaattattttgatatatatagttaaacgatttttaataggagtgttagggttattaaatgcggaaaggatagtttttttaataatggtgttgggaaaattggaagtttatatataaaagaatgaaattggatttttattttatattatagataaaatgaatttaaaatgaattaaagatttaaatgtgaaaattaaaattataaaatttttagaaaaaaaatagggaaaatttttatgatatttgattaggtaatgattttttggatataatatcgagggtataggtaagaaatgaaaaaaatatatataaattggattttattaaaatttataatttttaattgaggtatggaaaattaaatattatatgttttgatttgtaagtaggagttaagtgggtattaagttatgggtatttaaaggtatatagaatggtataaaggataatggagagtaagaaattggggaggatgggaaggagggtgaaggataaaaaattatatattgagtataatgtatattatttaggtaataggtttattaaaattttaggttttattattatataatttatttatataataaaaaattatttgtaatttaaaagttattgaattaaattatattaaaattaaaaaattattattgagtatttattatgtgtttaaattattttagatgttatatatttgttattttatttaatttttggtattattttatggaatagataatatttttattttgtagttaaagaaatttatatttagagagattaatttggatttatgagtaatgttgatattataaagtagaggtaggaagattagttaggatgtttttgtagaaattaatttgagtggaattgtcggtttgtgagaatagaaaatgaattttttgggaagattttataatgttattgtttttgtataagtgatttttttttttattttttttttttatatgtaaaatgtagatttattgaggttaattagatttataagaatgtaattatttgtgttattgtttatttttttttttttttttttttttttttttttttttttttttttttgtttattttttttttttaaatattgaagtttttaaaattttttttggaataagtattgattatagatgtttttgtgattcgtgttttttttaggtgtattttgaattttggtaaaataaatttttaattgattgagatttgttttagttatttttcggtttatattaggatttttttttttttaaagtttgaatagaattttattgtgtatatatatattatttttatttatttatttgttgaatgatataggttgattttatattttgattattgtgtataatgttgtaatgaatatgggagtgtggatatatttttaatttattgatttaaaattttttgtttgtattttggaagtgggattgttatattatatggtagttttattttaattttttgaagaatttttataatgttttttttagtggttatattaatttatatttttattaatagtgtgtaaatgtttttttatttttacgtttttgttaatatttgttattttttgtttttttgataatagttattttgaaaagtatggattgatatgttattgaggtttaaattgaatattttaagtttttttatttgaggatatgagtagtttttttaaaatattattattaatgttgtttttttgtatgaattatgattttgagttgagttggatatttgaatttttgagtatttggatatgagtttaaataggattgaaatattttttatatatttgaatattagtttttttttttattggtaagaatttgtagaagaagatattataaagattttatagaaagatatttaaggtttgtttgggaatgaaggtatatgatgattataaatttagaagttggggaagagttgtttttggaaatattttaggtattattagggaattagaagtagagacgaatagatatgttgtaaagagtgatatgtgtaggttagttttgggtgatgaaatcgttagtggtttagttgaggtgatgtatggatgagattgattggaagaagaaatttgtagaaatagattaggaaataaagtttcgttgtatatacgtttatagtaggtagtttgggtttttattttagtttttttttgtttttaagggttatttttatattgtatgagaagttatgagattggtgggttttggatttttgtgttagagattatttattttttttattttttttaagtgttttaaatgttttgtattatttgattttttatttttttgttaaagttttttttatatttttagttttttattttgcggtattttttaagtttttatttgatttttattatggagtttttttatggttatttgtttgaaggaggtattgtttgagtatagtttttgaatgttatagattttttttttagattttttaaattgttattttaaagagataattgtttaaagagaaaaggtttattttatatgtgttatgaaaaatttatgtaatcggttatttaaaagttgatataagagaaatatgtaagtagttttataaggttttgaaaaatttggagataattatttgataaatttttattaaaggaaaatgatattttggggttgtatttttgttattattggtattaaggaggttatagaatttttttgattttatagtgttttttgattttggaagtaattgtaggatagagttttggataatttttttggtgataggatgatttttgtgtttatatttaattgtattgattaagtatagattttaagagatgttgattagggaagatgattttttttttgattttataaagaaggagtttataatttttttttgttttgaaagaagagataatgtgttttggggagtttttttagtgtaattttgattcgtaataatagtagtgtttttattttatttttttatatggggtgtgtgtggttttattttaagcgttttgtttttattagaggtcgggtaggtgatttgggtgaggtatttagaattaggatgtttgtttgagttgtttttttttggttaggttaatagtggttgttttgagtaatggagtagggataggaatattgtaaagaattgtagagaaggttggattagggggatataattggtagaagttttaaattaaagttttttagattaggtgttttttttttgttgttgttttgttttgagatagagttttgtttttgttttttaggttggagtgtaatggagtgtaatggtgcgaatttagtttattgtaatttttgttttttgggtttaagcgattcgtttgttttagtttattgagtaattgagattataggtatgtattattatattcggttaattttttttatttttggtagagacgggttttattatgttggttaggttggttttaaatttttgattttaagtgatttgtttgttttggttttttgaagcgttagaaaattataggggtgagttattgcgtttggttttagatgaggttttagttagttagaaaatggttttaagttgatattttcgttgttagttgaaaagtttgtgtggttaggtgtggtggtttatatttataattttagtgttttgggaggtcgaggtgggaggattgtttgaggttaggatattgaaattaatttgggtaatatagtaaaattttatttttataaaaatttttttaaaaattagatagaatggcggtgtgtgtttgtatttttagttatttgggaggtttagataggaggattatttgagtttaagaggttgaggttgtagtgtgttatgattatgttagtgtattttagtttaggtgatagagttagattttgtttttaaaaaagaaaagaaaagaaaaaaggaaaataaaaaaaaaggaaaagaaaagaaaaaagtttgtttgaagaggtttatgagattggggagtttttaggtttgacgtagattttgttttatagttttagaataaatttgagggaagtttttttttttgaataggaagaaggggtgggttagaggtttttatttcgagggacgttgaggtggggattgagaggatattgagggtatttttaggtttttttttgtttatttttttttgtttttagtttcgttttaggtttgagtttgatgttttttttttatgtttttatcgtattagtggagattttttttagattgggggttattttgattttgagtatattattgttgttagaagtttagtaataacgtttttagttttaggtgatttaaatttatgtatagaataatatagaatattagagtggtttaatgtttttatgtgttattattgtaaattttttgttatcgttttttttttgtttttttttatttggtaaatatattttgtttttagatgttttttattttttattttattaatatatagggaagagtgggaggaagggagataagaagagaggtggagatatttattgttttggttaggattattagtaatgtttgttaggtattgttttaattgttttataattattagtattatttttagttatgggtaacgtaagtttgataagtaagaaatttatttataaaaatatattggtatttttgttattttggatttgatgtttagggttggtttaatatgatttgtaattttaaatatttgttttattattaatacgatttagtttttaggaaatttttttttatagtttttgttttttatttttaaaattaaatgtgattgtgtttgaatattgtaaaatttgtgtattgtgtttttgtttatattagatgtatttgttttatggtttagggaggatttaagtagttgaagaatttataagagaaaagttaataaatatttttattcgaagagtatgaatgtaatatttttttgtataataaagaattatttgttagtagggttgggtgttaattttttttttttttgttttttttattagtttgatagttatatataatagtggaggaggtttttgtaatattaaattagttatattaatgttaaatttgtatatgtgaagatttagatgtaaaatgtataaaatatgatttatattttgtaaagagaagtttgggggtgaaaaggagtttagtaatttgttgatttttataaagtatattagtggtagaattgtaatttattattatttttttttaagaattttgttttttttattaaaatttaaggttttttagagtgtttaatagaagtgaatatttttgtgataattttttgttttttgaaatatgatttttatttaatttgttttattaaaatttttaagtataagaataataggttgtaagatgtttatttttgaattatatttgttttttgttttttaaaatttttaagttatttaatttttagttatttagaaatttttattttaaatgtttatttagtgtaatttgaagaagaaatagtgttaggtattggagtgagaatttttatagaaaaatgtttgtttagaggtagatgaggttttttagttttagtgttgattggttttttttttagggattttttaattttattatatatggaaatatttagaggtttttatttttttcggtaggtatataagatttattaggtttgagttgtgttgattattattgttttttttttggttttatttatgttttggaagatggttttgtagatttttggaggtttttgggtagtagttgtgatcgtgatgttggtgatgttgagtattttagtggttgaggttagagatttttttagtaagtgtagggtagttgttttcgagagttattattgtgggaataggttttttttgggttggagtatgggggatggtgatttttatgattttagaatatagttttttattattatttattttttttgggaaatagagttatgttgtatttttatttttattttataatgggtgaggtgaggataatttaattttaattttataggtttaagtttgaaggaggagagaggaaagaggagataaagtgtgtatttattatttgtgataggataaaatgattatggtattttacggttatgtatttttttaaagatatgtatttttttaaagatatagtaggatttttttgtattgggaaaatgtaaggtagtaatggtgtttgtagtttttgtattggaggtaaaggagtttatattattgattcgagtggagagtttgtggaggtaaatttttagtattgagggaaggtgattggatgattatagatagggagttttattttgggttttattgatttatgggtaaaaggtgatttgagtgggatttagggatttgagttgatggtggattgaatttagtatgataggaaggaggaagtaaagaagggaaataatatatattgagaaattattttatttagatataggatagtattttttataaatttttttttattttttttaatattttatgtgtaggtattatgattttttttttatgtaattatatttgtgatatggatattttgttaagtaatttgtttaagttggtgattgatttagtttaattggattttatagaatttaaaagtttgggttttttttatgaataaatgtttttttttaggatttcggaggtgtaggttttttttaatatagaagtgagtgaattttatagggtatttgggcgggtatagtagaaagagagtaaatttaggtatgggtttatttggttttttgtttagggattaagagaatatttatattaggatgagaataagtttaatttttgaatttttttcgttatttttttgaatttttaaatttatgtggataattttgtttttgagatttttaagagttttatggaaaatgggattttatacgagaacgttttgatttaagagtagaggttaatgtcgaatcggttcgattgttttttttatttggtttataggtttaggtagggattgggtttttttttttatttttttaaaggaaggtagattttcgaggtttttagagagggcgggtagggttggggtagagatgtttcgaggattttaggttcggagtacgaggtacgggtttagttaagaatttaatttcgcgtggacgggtttcgtagttgttggtcgggttagggtagcggttgaagggtgcggttcggttgggggttggggttagggtcgtgttggggtttgattgattcgtcgtgatttttcgtagaggattttttggtttagtttaagggtatgtgttattttattaacgggatagagcgcgtgcgcggtgtggttagatatatttataatcgcgaggagtacgggcgtttcgatagcgacgttggggagttttaggcggtgatcgagttggggcggagtatcgaggattggaataattataaggattttttggagtaggagcgggtcgcggtggataaggtgtgtagatataattacgaggcggagttgcgtacgattttgtagcggtaaggtgagcgtcgtcgttttttcgcggggtttatttttggtcggggttcgagttttttgcgtacggaggggcgaggacggcgcggttttaaggatcgagttttgatttattttagggtataggaaggtagcggggatttggaggttggggtagtatcggaggggcggggatttagggtagagtagggggatgtataaaagtattttttagttttttgtagggttgggttaggttgtttagtgtgtttttagttttttcgtttatcggttttgttttttgttttgtatgtttttgttttgtgttttatgcgtttgttttttcgtgttttattttcgttaagtagttttttttgttcgaatgttcgttttttttttttgttcgttcgttttattagtattgttttatttagtaaggtttatttgtatagttcgcgtcgtaggaagttttaggtttggtttggtggagttagggttgttttataattgcgcgtagggtatttagtaattatagttgtgaaataagatattttaatttttggttttaaattattatttatcgtaattttgtttttttaaacggtttttatttatggcggagttttttgaggtgagagtgttttaattattgtatgtttagtatttgattcgtggatcggtatgtggtatgagtttaatgattttttgttaaattaatgaataaatgtatttagttgtttatttatttaggtttaagggaaagtagaggataaatagagttttaaagatggattttattaattattttttattattttgtttaatgttgtaaatttttattgatttggattttagtaaggtttgtgaatgtagtttggggaaaaaggtgtttgttgaaaataaaaataacgtttgaatggtgttataaggtagttttaattttttagaaaagttgaataaatggtataatgaaaagagtagaagttttggaatatatagattgaagttattaaattattgaataaaaatagttttaggttgtttttggagtagattttttttttttttttattattatttatttcgggtataaatattttgaacgttaattttatttatttagtgagtatttatttttagataattgttttagtaaatattatttaagttatgttatttaatagtatagttatttgtgtattagagattagtattgttattttatatatcgtaatattggtatatgataaatattttaagtaattaatttatagttatgtattaggatttgaagttttttttaaatatatagtatttttttatgttttttaatattcgtttatatagtttaagggaagtaaagttttgttaaagttaattttgataagaagtagtaatgggtttatttttgtttgtttttattgttaatgggataaaatgatatttttaaggtattgaaaatttattgattaattaatttttagtttgattttagtgttatttatgtaggtttataaaatttttttgtttttttttgatttatattttaatgttgttaattatttatatttttgttattttaagtttatttttataaaagttattttattattttttttatgaatttgtgttttttatttttatttttagttttttaagatgaataaattttgtaagtttttatatagttgattgttattttagttagattttaggaaggagggtttaaagaaaagtttaagtttaagtagaaattaagattttttttagataatggtttatgagtgttatttaattggggtgttatttgttgattttagtaaattttagttatatgtatatgtttgtattataggtatatttatttaggttaatttttgtatggattttagaatattttttatggagaacgtatatgataatgtttgattttagaataagaaagtaatttttaatagtaaggggatggagtagggtaggtagttagtaattatattattttgagggttaaaaggaaattaagaaaaagtaggaaaatgagagaatatattattaagtaaataaagtatatattaaatatttattataattttatattaaagaaataaaggaaatgtagtaaaatggttagagaggtaaaggttaagatgtataaaatatgtagggaaaggtgtgttatttttgattatgagtagcgttttgagaagataaaggaattgagttatgggtaaatatgatgtttgattagtgttagttttttttaaggtttgtttattttttttttaaatattataaatttttgaaataatatttaattttttggtttttgttattagattgtaagttttataaaggtaggaattagggtttgttgtttatttttggatttttagtgattgttaaatttatatttgttgaaggaattttaatttaagatttggattttaggtatttttttattttggttttaaggagggattttttttatagtaggcgtgttgtgtggttttatattttatttttatatttttttttgtttgttattgtttttagtggagtttatagtgattatttttttatttaggatagaggtttttaattattataatttgttggtttgtttagtgatagatttttatttagtttagattaaagttcggtggtttcggaatgattaggaggagatagtcggtgttgtgtttattttttttattaggaatggtgattggattttttagattttggtgatgttggaaataattttttagcgtggagatatttatatttgttaagtggagtattttagtttttagagttttattatcgtggagtggcgtaaggggaaattggtttttttttattgtgggttttataagataaagggtagagttttcgttgattttttttattttattttttgtttttgatattattattgagttgggaattataggagattagagtatttgttgtttatggtaagtatattagatgaattttgatttttttgtttttttagatattagggagattattttttatatttgtgttagtttatttttgtattgttataaagaaatttttgagattgagtaatttataaagaaaagaggtttaattggttttttttattttattataaagaaatatttgagaatgggtaatttataaagagaagaggtttaattggtttatgattttgaggttgtaggggaagtatagtggtttttgtttatggggagatatatggaagtttttaattatggtagaaggaaaagagggagtgaggtgttttatagggtaggggtaggagtatgagagagagggggttggtgttacgtagttttatataattagatttatgagaatttattattgtaatgatagtattaagggagatggtgataagaatttggtttaatgatttagttattttttattaggttttatttttaatattgttaattataattgaatatgaaatttgggtggggttatagaattaaattatattaatattattaaagttttagaattagttttgatagttatgagagattgatttagggttggtgattggggttttagggtttaaggttatggatgaagttttgaggggtaggggtgtgttttttttttttttttatttatttattgtgtttaaagatttattggttggttttttttttttttagggtggttagattggagaattagtgttttttgatatttttattttttgtattaaggatattatggggtgtggggataaatatttatatttaggttttgttttttaggggtttagtttgaatttgtttagagtaagatgttgggtggtgttggaggtttcgtgttggggttgatttttttcgggttgggttttattattcgttataggggttagaaaggtgaggaatttaagggggaaatgggggaagatgggttgtgatttagattttttatttagagaggttttgtttttagatgtagtttttttttttttattttgagaggaagtgcgaggagataggataagattggaggaggtattggaatttgattttattgggtgaatggtagcgttgttagagttgattgatagagtttattttagggcgtttttatcgtttattatcgttttattggtttttttttaaaagttttttttattaagagggttagagtttcggtttttttgttttttagtgataattttttttgttttgggggattttaatttagggtgtttaaggatttaaagaatacgggagggaagaggatataattttaattaaattatatgtgttatttttttttggggtaagatagtggttgtttgtttaataagatttttttttgtataatttttttttgtaggatttcgagggtttttatttgtaggtaatattttagttatgatttagttaggggagagggtataggtataagagggaagagttatggtgaaatcgtatttttattaaaaatataaaaattagttggacgtggtggtgtgtatttgtaatttcggttatttgggaggttgaggtaagagaattatttgaatttaggaggtagaggttgtagtgagttaagatggcgttattgtattttagtttgggcgatagagttagagtttgttttaaaaaaaaaaaaaagaagagtatgagcggagtgttttagggtatagtggtttttgtttatggtttgtttgttgttatgagggttaagatttaggggagaagtttgttagtttttacgaatttttagagattgttttttagaattaggttttaattttggtggtatttttttgtgaaatgtggggatagagttatattttgaatgtgagatagtagggtgatgtttattttgtgttatattttgttagttattgtttgtaggtatttttagtgattaaaagaggttgttagtggtggagatgaagtgttatttaatttattaaaaaaattaaattttttatattatttagaagggtaattgttgtttttttatttttatatatttgtattaagttgaagttttgtgtttttatgagttgattttatttttatatagatattggggaacgtgatgatgatatgttttggattttagtattttttgtttgatgttgtagaggaaatttaggattgggggagagggtgtgttttttagggtattttgtgttgattatgttttattttttttttttaggatttttgtattgatttttgaggatttttgtttgggattggttattatttttttgtaatgtttatttgtttttgtttagaatttttagttgtttgtgttattttgttttattgaggttagagttttatagtggtttatgtagttataggttattttttgtgatttttattttaaggtattggcggtgattttgttttttgtattgatttagagtttttgtttgtgtattgtaagttgtgtttatttaggttttaaggggtatttttgtttttattttttttttatagatttgttaagagaagtatgataaataaaattatttatttaattttagtgtttttttttataattaaatttgattttgagttatttgtgttcggaatttttttaattaagtagaggtaggaaattattgttaagtgaaggaatatattttgaggtgatttagttaaatcgtggttagaaagagggttgtattttgaaaagatattgaaagtattttggggtgtaaagtaagggtaggtagaggaggtagaaaattaatttagttattatattatttatggttttttaatattgatgtttagtgtaatggttttaggatattttagtttttttttcggtttggcgagtgttgtttaagtaagtatggtggaattgtttggggataattatagtgattgatgttttaaatatattttggttggtaagttatattaattaaggttaatttttatttttaagaaagtataattaggaatgaaagtattatttttggttttaaatgatagatatttaatttaaagatatttgatttatgttataaggaatgttggttttagaagtgattagttttagatattttatgagatttttattttttttttttttttttgttatagttttatttgtgtatttttttttttttttcgtgtgtttttttgtttttgtgtagttttttttgtgtgtttttttttagttttgtttttgttttttttttgtgttttttttattgtattgttgtttttttttatttttgtaattttttggtattatttatttgtatttttttttttttttttttttgtatttttttattttttgtattttttttattattttatattttattttatgttttttttcgtttgagtgtgtgtgcgtgcgtgtgtgtgtgtttgtttttgttgtatatgtttttgaagtgtttattagagttttaataatttggggaaagattttgattgtttaagtttgggtaatatgtatattttttaaatatattattttgtgtacgggatgttgttagttagtatgtttattttttttattaggaaggaggattgggttttttagatttttttgatgttggaaatgatttttagtgtgtagatgtttatattagttatgtggaatattttagtttttagagtttttttatagtagagtggtgtaggggaagtttgttttttgtggagtatataggttaaacggtagagttttttttggttttagggttttttagtgggggtatttgtttatagttattttattttttgtttgagttttttttgttattgatatcgtaatttgtttatttttgatgatatttttttttcggttatgagggacgttattatatattgtgatttttttgatgtgggtttagttttgaagatggtttatatgttagtttttgggtttgttattaaggtagataagtttttttaatttttagttcgcgggttgtatgtagtttatgatcgtatttaatgtagtttaatatagattttagaatatttagtttaatattgttatattgaatatattttggttatgagaggattaaagttttttttttttttttttattgatagttttatagaaataattattttttgtatttagattttattgggtagtataatttttaattgataattaaagtaataagtatattttttataaataagtttgttaataagaagaattgagttttagtcggtatataatttggaggaaagtatgtgggtgttttagagaataatttgttagttgttagtatttgtttttattttaggaaatattagtatattttttagagataatgttgttcgttaatatgttataaggttttttatattttttagttttttttgttgttaggttgggattatttgattaatattagttaatggaatttgtaagtagatgtacgatgagacgttggaaattttatataatttgagttattggagaaattgtggaattaagtttttttattaagtgatattattaagatttgttttttattgtgggttaagattttattgtatattaattttattttttttaataattatggaatgtttaattttagaggagagtttataagttaatagggtgaattaattgagttaatagaaattgagatgattgagatgatatttttaaataaaaaagtttttgaaaataaagaatagaaaattttatttgaataagaaaaagttaagaatgttatattttaaaaaatttaaattatttttaatttataaataattgagtatttataaggtataattgatatttcgatatatgtatatattatgaaatgattaaattaagttaattaatatatttattattttatatatttatttttttatgtggtatgaatatttaaaatttgttttagtaatttttaaatatataatatagttggttttgtatttgtgggttttgtattttttgatttagttaattatggattgaaaatatttggaaaaaatgataaaatataataatataatataaaaataatatagtttaaaagaatatagtataataattatttatatagtatttatattgtattaagtattataagtaatttaaagatgatttaaagtatatgggaaaatatatttaggtgatgtataaaaattaagttatttttaataagagatttgagtatttttatattttggtatttaggaagggttttagaattaattttttatggatgttaagggataattgtatgatattattaattagttattatgttgtataattgatttttagtatttattttttttttttaattgaaatttgtattttttgattaatattttatttttttttttttttttttttatattttattttttttatgattttgattttttaagattttgtatgtaagttaggttatgtcgtatttgtttttttgtgtttggtttattttatttagtatattgtttaatgggttcgtttatgttataaatgataagattttttttttttatacggttgaatagtattttattgtgtatatgtattatattttttttatttatttatttgttgatggatagttaggttgattttattttttggttattgtgaatagtgttgtaataaatacgggagtgtagatatttttttgatatagattttattttttttgtatatgtatttagaagtggaattgttggattatgtggtagttttatttttaatttttaaatagatgttgaattttatttgtttgtttttttttatatgaatgtatatgtatttttaggaattagaatagtgtttttgtcgtcggtgttgttttattgtatttaaatttttttttttgagattgaacgatttattttgttattgttgggaatgttgttggttgattgtttttagttgttagttatgtttcggaattgtttttggtgatgaaagttgttttatcggattttgatttattttttaggaggaatttatttataatgattggttagtataggagtataaaagtttgttttaatttgggttaattttgaggggtttttgtagtttttgaatagtttaggtcgaagaataatagtttattttttttgtaattgaaataatagtttaatttttaaaattttgttttaatttatgagttattttatatattttttttagttgtgattgtaatttaaatatattgatttttgtgatttttgtaagtatgggtaatgttttttttttttttttttggaagatgaagttattggtattgttattttttttttttttttttttttacgtttttagttgttaaaattaagtatttatattttttttttttttttaatattgttaaagttgaaaatattgatattttgttgtagtaataagattttttgggttttgtttatagattaattttaaatttgaaaaaaaaagtttattattttttaaatattatttatgtagttaggtattttttgtttgttaagaaattgttgtagtaggatttttttttagtgagattttgggttaaatttagttttttggattttttatttttttatattttgattaataattttaattggttatatttttagttaatttttagtaaaattttgcgtggtaggtaaattttatgtttttttatatttataggtatttttattttttttttatgtttgattgtgattttgaaaagatttatatttattaataaaaaataatttttttttagaattttaaggatttttttattattttaataatagaagtattttttttgttgttagtttgttttattttggttttcgttattggaatattttatgatttttttataatatttgaagttttgaaattttgaaaatgagatatttagaagtgagtttgttaattttgttaaatatttgataagattattttatggaagaattaaattttttatatttggaaaatttttttttattatttgttttgattattttttttttttattttttttgttggtttttttagttttgttatttgatgtttgatttttttggtttgttttttattttattttttttattatatattatatttttttttttgttttttaaattattgtgagatttttttgatttaattttttaatttttttattaaattttttaattgtttttagtattttattattatttttatagattaagaattttaattagaatgattttaaatttgtttgttgttatatgaattttttttattaaatttgtgataatttttatgttattttatttttatttttttttttatattgtaagagttttttaaatatttgttttggtttttttaattttgttttttatttattgtatattattttattttatttgaagatatatttttttaagttatttttaaattgttttaaattatatttggtttttgtgtaatatttttttattttattttattttttttttttataaatgttttagattttgtaattatgtttgtggaattatgtaatatatgtattttttttttattggagtgtaagttttatgaagataatgaatgtaattgtttttatattattttaataatatttaataaattatgagtatttattgtagtattgggatttaatgattatttttgtatttttgatgaattagtgaatatataaataagtttgggggtttagtttagttaataataaagtaagtattattttgtttttttttgttattattagtttttgtatatatattttttatagttgtatttttgagaggtttttatagttttgggtaggttttggatagggttttttaaatgtgataaaaatgagaaaaattgaaaaattaatataattttaaatagaatgtttgtttgtttatgtttatgggatttttttgaatatatttaaaaaaaaaaatttttgtattatagaaaattttaattgtgtgtaatagtatagagaagaattttatgtattaatagttttgttttaataataattaatttatgagtaattttgtaaatttatttagttattatataggtatataatggattattttgaagatatttttaggtattatattttatttatatatttttattatgaaaatttaaaatataatggttttttagaaatataatagtaatgttattaatatatttaaaacgagataaataattttttaatatatttagtgttaatttttttgattgttttatataaattttttaatagatgttttgtttgaatatgaatttagataaagtttagtatttggttattatatttttttagttttttttaagtgtatagttttttttttttttatttttaattttttttgtaaattgtttgttggagaaatttttttatttaatttagtagaattttttatattttgaattttgttgtttatatttttgtggtgttatttattatgggattttgttttggattttagaaaataataataatataaatttgttaatttttataaattgtttattatgggttagtttgtgtgtgaagtgttttatttgtaatgtttaattttttatatttttagtttgtatgtggtaagtataaatttgaaatattttacgtgatttttacgttttgtaatttttatttatttatttatttatttatttatttatttttagagacggggtttcgttgtgttgtttaggttggagcgagtgtagtggtgtagttagttttagtttattgtagttttgaatttttgggtttaagtagtaatttttttgttttagtttttttattagttgggattatagattggtttttattttttgggttttaagggatttttattttgtgttgagattataggtatgaattattgtgattggaaattttgtaaaatttgaataatgtgatattatttattaatgaagttatattttatgtatgtaatttgaaataatttagataataatttttaataattatttaatttaaaattatgtagtttgatttataattgtttataataataatataataatataataatgatgattttattttgaatttttagttgataaaaagatatatttgttttattttataaaattaattttaattatgttattttaatattatataaatattttttgaatatatttttttagtaaaatttaattattattatatttgttttttttagtattttttggggaaggattttaaataggggagtatttgtgtatttttgtatgattttggttataatgttatttaatgtaagttttatatatatatacgtatatatatatatatatataaatgtatatatttttagaatgttgggtttttggtttatgaattattgaaatttatataaaatttattttaaattttattgtagaaaagtttttagtatatttatgtatttttatgtgattatttttatattatagttttaattttatatatttgggattattattgttgatttttttttttttttttttttaatagagtttattttagagaagttttaggtttttagaaaaattgtagagtatagatagatgtattttatatgttttttgtttttatatatgtatagttttttttattagtaatattttttacgatagaggtatatttgttataatttatgaatttatattgatatattattattatttaaagtttatagtttatattaaggtttatttttggtgttgtatattttatggatttgggtaagcgtataatgatatttatttattattgtggtattaaatagagtagttttattgttttaaaaattttttgtgttttgtgatggacgtttttatgattattattggtttagattttttgtatttattaatttttagtttgtatttataattattttttttcggagtttttttattttttttttaaagtaaatatggataaattgttgttgtatataatttattttgatttaaaatttatgggttataaggagggaatatattttttagagagttaaaaatcgaagttaaatattataattttttgttttaagagtttttttattaatttaattttagttttttaagaaagaaaaaaattttttagttaatatatgaaaagaaatttatttttacgtttacgtttgaattttttaaattattaaagggttaaggaaaataaatgtattttttatataatatgatttattttttttaataaatttattataaatataattgtagtgtttttttatatatttatatattacgtgtaaggtattgtttatatattaagattatttaaattttgttaataattttgtaaggaaaatattattatttttatattgtggatgagaaaaataaggtttagaaatgttaattagatattttatttagtaaagtttaaaatattagttttaaaatattgagttaagtatttggatttaggtttttttgtataaaattatgttgtattaattattatgttaatgttttgtttttttttttttttttattatattttaaatttattgatgtagatagtatggatagaaatattttggtagattttatagttgtttagagtttttaggtttttgtggatttattttttttgagagattttttattaggagattacgaatttagtgtaggatataatatttattattgttgttatattgttttaattgttttgttttttttaggattttttttttataggtttatgttttttttagttaggaagggggaggagtagggggttggggtttttaaatgggtttgtagtttttatttttatttgttttttattgttattaattttaagtaaggaataagtatttgtttttttttagatatttatttatattattgttttattttaatattttttttttttaaaaaatttatttatatgtatttatttatttttgagatggagttttattttgttgtttaggttggagtgtagtggtataattttattgtaatttttattttttaggtttaagcgatttttttgttttagttttttgagtagttgggattataggtgtttattattatgtttagttaatttttgtatttttagtagagatagggtgtaattacgttggttaggttggtttttaagttttgattataagtgatttgtttattttggttttttaaagtgttgggattataggtgtgagttatcgtgtttggttttattttaatgtttttttaattggtttttatttttttttttgtttagagaatttttatttttttaaggtgagaaggggagaggaaagtttttattgttgttattttttataaatttaaagttttgagaatgtagtttgatttttggtaataaaattttttatttttgataatttttgagatttaaaatttttgtattttatttttttgttattttttttaagagttatattgaaattagtatagatttttttttttttttttgtatttttgttataattattttgagttaagggtagagggttcgttggtatttgaattgaggggtgggtggtagtggttaagggtaggaataaaaggaagaaagaaatattaatattagttaagaaattaataaattattaggatatattgtatttggttgtttttgtgttattggatatgaaatatgatttggggaatgatatgaaattggtttaaaatataagagttatttattttaagttatgtttttagttagttttgagatgaaagatgggaaaaatttaatagaggtattaaaagggaatttattgtttttatggagattttagataaaggttattgaggaattaggtagttgagtggtttatttaggtattttttagtaggtaatatttgagaaaataaaaaaatttaggaaaggaggttagggaaagaattgaaaggtatttgtgagttttgagggaatatagtattttaagttttagagaagaggtgagagaagaaatatttggaggagaaaagggatatgataaattaggttagagaatagtgttaggttatttagtaagtttatttttttttttttgtagatggtgatgtatttgtaataggatagatatgagatcgatgggtttgaggggttttttgtgtgattattatgttattttttaattcgtttataatttttaattatatttatgtttataatttttttttattttttttttttttatattgaggttttagttttaataaattttaattttattttttttttaggatgagatttataagagtttttggtgtttggaagtattaattgaacgtaggttttggatgatgaagatagtgtttattataatgtttatgaggtttatagataattttagggcgtagattaaagtttttgtgagttttgatataggggttggaattttaggttttgtgaaagtggagttgttgaggttagaatgtgtagtgtgtttatgtgtatgtgtgtgggatgggatggggtggagggttggttttgtaagatttaaggttttaggtttagggagaagagtgaagtttgttattagaaatttatgaagtggtggaatttatttttattttagtgttttagaagaggttcgtttaggttttagtgttttattttgtagttataaattttattagtagaagggaggaaggtgaggtaattgattttgaagaaggaatgattatttttggagaggaagttggttttagaaatattttttgtgattgagtgtttattgtttagttaggtgatgttgattataggaggaaagatgttgtttataagatagatgagggtgttgggttgatttagcgttataggaaatttggaaaatattgtgattttaggaatttttgtggtgaggaaatagtattgatgtgaagtgtgaatagttttgttatgagtttttgtattatattttggaagagtttttttattagtattttattatttgatagttaaagaggttttatttattttttgtttgggagtaacgatatattgtttttgttttatttttgtgtttttttttttgtgggtatgtttaataaagtaggaattaatatataatggaaagatttttgtattatatgggaatatgtgattttagagatgggagatgataaaattttagtaattattatgagaagattcggaaattttttgagaagaagggagtaaaatttggtatgaaagattagttttagtaaagagaggcggaatggtggatatatattattggtggtagcggtagagttggattgttttattatgaattttaaggtgtgtttttttatagttatattttttagtgtattttgcgggttaaaatttataaatttgttaaatataggtaattgttagatagtttttttcgtttttaggtttacgtagaatttttcgtttttattaaatttatgggtgtattggttagagggatcgtgagattggtagaagtttatattataggaggtaatatggttagttgacgagtgaaggtgataagtaggagggtggaatatagggagaaagaattttaatatagaaagtgattgaagaaatttatttttaaatattatgggttttatttttggtatagtttttgaataatttttttaatatttgttttttttttgtttaacgttggtagttattaggttagaattgattttgttttttttattataatatatgttttataaaggtagaacgttatacgtttgttattttttgagtgtttatttagtgtttggtatattataagtttatgatgaatattgtaataaataaaggaaggaatgaatgagttattataggatttagtttttttatttagagatttagtttatttttttttgttttttaagtttttttttttagttaataataagttgattatatttcgttttttgttaggattagattagaataggatattttttatatagagttttttttatttttttttttttaaattaaagaaaagtatgtaggaacgtattaatttaaaagaattttttttaataattatagggtacgagaaagattattataagaatagtaatattatatatttataataaataaataatttttttaaggtttttgttttgttaatagtagtggtttttagaggagagtatttgattttttttgaaatgaaaagtggaagttcgattggttttttaatttttgttattgtttttatttttttttttttttttttgaaggaggttattaaatgtttatagtgttttgatttaataattatatttattcgaggatttaggtaaattaaatttttttttttttaatgggtagtgagtttattcgaggatgtaagggtagagtagtagttatgaagtatagttaaatgagtcgaattggatatttttgttaagatatgtgtgagttttttattattttatttttttttttttttttttttatttattgagtatttaaaagtgttagatagagtaggggttgtttaaaatagtattaaggaatgaattgaatagtgggagaattaggtcggtaagggagtaaatataatgtattttggggagttttgtgaggaggatatcgatagttttatagttcgatattttttataattatttgttaattaaattaaattatatttttttttatgtttttgtaagggtttgttttttttttttgaaagaagttattttttaggattttttggagaaattttaaaatttatttttgaggtttttatttagttaataattttgtagttaagtgtttttaatatgtttttgatcgcgttgtgatttttaacgttttaatggaattttaatgtttggttttttaagtttgtttgttttttttttagtttatttttttttttatttagtatgattgttttggttggttatttaataggttattaataaagattttttatttttataataaattttgattttttgtttaaatatgaatatatgtggaatatatgtaatttttttttttatttggtatttgttttgggtgttgagtgttgttggaggatattattttattggtttagttggaattaagttatttttatagttttagtttttgttgggttattgttttgtttagtagggttttttgtttttttgtgttttatattgtttttattattggtttgtgtattttttgtaaggtagatagtatgattttttatttttgaatttttaaaagttagtttattgtgtgtttaaatatgtgtattgaatgataattgtaatttttgataattatatagattttggggaagattgataggtatttaggtagtagaattacgtaaagtttaggattagggatgtttagggttgaattttgatttgtgagtttcgagtattgttgtttttgtgggcgtttttttttataaaaatacggaaaattatagtttttgattgtattggtataaagataaatataatttaggttatattaaaagttaaggtcggacgcggtggattacgtttgtataaattttagtattttgggaggttgagacgggcggattatgaggttaggagatcgagattattttggtttatacggtgaaatttcgtttttattaaaaatataaaaaattagtcgtgcgcggtggcgggcgtttgtagttttagttattcgggaggttgaggtaggagaatggcgtgaattcgggaggcggagtttgtagtgagtcgagatcgcgttattgtattatagtttgggcgatagagcgagatttcgttaaaaaaaaaaaaaagttaaaatatttttatagattgtaaaattttattttttttttaattttaaaacgagttaaaacgtttttttgtagttttatagtttggagagttttttttattgtttatattgtttttaatggataagtcgagtttgatcggggtattttggtgtgaggttgaagaaaggagatttgaaaaaaaaaagttaagtgttttggagaagtaggtgaaatttttattgttaaataaaattagaatgggagtagttatggttaataaggttgtggaagtttcgagtagtttttagtttatttttttttttaattatttgattttttaatttttgttttataaatttattgtttatgtttgtaaaggagtagggagttagagatggattttgaaagggaagagggagaaagggatgtatgaagagaggtggaaagagatggacgataaaggtagaggggattaagggattaaataatttgtgtttgtttatttttttttttataagattttattagataaggtgaagaataagtaatttgggttgataatttgagaataaaataatttaatttattaagtattttattataaagtttttagttttaaaatatattttttattttgttaaagaaaaaatacgaagttatatttgtaataggaataagttaaaaaaagttgatatttatgtttttattatttataaagtatatttatatgtttattttatttgattataagcgaggtgatatatatgaggtagtagagagtaagtattatatttattacgtggtaaaatgattgttgaaggtatttagtttgttgggtttttttatttattttttatttgtgttaatttttatgtggaaatgtaagtttgagagaaagaaaagaatttttttttttatatttatagagtgtatatattttatggaattatttattttaatatatgttataggaggtatatgaaaagttttaaaagttgtttagagaaatttgggagtaatagtttagaaatttttaataataaaaaaatattttatttatggaaatatttttagtttttgaggtaattatgatggaatgttatatagatttttaggttatagtttttggatataatataaatagaataacgtttttggtaaattttaatagtataggtagtaaagagagtcggttggagttttggttttttaaaggaggaattgttataattttaaaattttttaatattgaaaagatttttgggaaatttttattattttttagtaaattgtattttttttttttttttaatttgttgttttttagttttagagaatattttttatttatgtatttatttataatgtttttatttttataggggtttattacggtagttagggcgagggtttttagtagtagagttttgtttaggattattttttttttaaggtagttttagtagttgttgttttgagttgtagagtaattgtgaggatttcgagataagtaaatttgaagatatttaaattaaattttgttaggttaggttttggttaattagaaaaattttttatggtgatatattgtttgttagttgtagagtttatattaagagttttggaagaagatagggatattttttggttttgatatattttttatatagtatggttttgaggaaattttttataaataaagggaagatattaaatttgaattttttgttatgtgtgtatgtttgttagtgttaagaggggcgggaatttttgagtagtcgtttggataggtaaggttattaataatatggtattttttagggttttttgggttatattttttaggaatttttttttgaagtgatttttttttttggtagtttttatttttttttttttttttggtttttgtatgtgggttagttgtttttttttttgtttttatagtgtatatggtattttttaaattttgatttgattttatttttttagggatttttgttggtggtagttaagtaatatttttgttttttttatttgtataaatttagttgggtaagtttttaaaagttttaggtgtttttgattagggtaattaaaggggttagattgttatgcggtgttgtttatagtaatcgattttttatatagtttttttttttgtttttagtaatttttatgttttgtgtttcggtgttgtttgaatatatttaaaggaaatttagggatattgattatattaaaaaagttttggttggtttaattattttaataatttattttattttattttatttatttatttattttaagacggagtttcgttttttggtttaggtcggattgtagtggtgttatttcggtttattgtaagttttgttttttgggtttacgttatttttttgttttagtttttcgagtagttgggattataggcgttcgttatcgcgtttagttaattttttgtatttttagtagagatggggttttatcgtgtgagttaggatggtttcgattttttgatttcgtgatttgtttgtttcggttttttaaagttttgagattatagatgtgagttatcgcgttcggttagtaattattttttttaaatttaagaatgttaagttaaatattgagagtagaataaggagaattgttttaatttagaaaataggtttattttttttaaattattggatttttttatatttgttatttaattatattaagattttagatattgtaagggattagggaatgagttaaaatgtagttattatagggaaatttatttttttttagatgaatttattttttgtatgttatagaaataataagttagtaatggaggtttcgtttagaattattttgtttttgttgaatggttttttgagatttttagtatgttgttttgttttttaatggtagagattaaaaaaaggtaaaataaaaaagtgttttgatatttgggggttgtttggatgtaattaataaggttttggggttgttaggagttagtttggtgtttatagttggttttgatttttttgttgaagataattaattttatagaatattagaattagataggtattttatgagtgtgatggattgagatagaaaataaggttatttagttattacgtttgtatttagataaaatatgaatattgtttaaattataaaaataattaggtatatttttcgaaagagtgattgttgtttttttattaattatagtcgtagttttaggatagtttttcgtttttttaggtagtatttatgaagttatttaattatagtattgttatttttattttttgttttttgttagaatttagttaaaaatgaagttttttttttttaaattttttttaaaattatttaatataagtataaattttataattgattaatggttaattttatgtgttgattggattgtggtttttagttatttatatattaataatttaggtgttgttgtgaagatattttgtagatgttattaaagtttataattagttaattttaagtaagaatttatttgagataaattgggtgagtttagtttaagtagttgaaaagttttaagagtagagttgaggtttttttgaggaaatagaaattttattgtggatagcgcgttagttagtgttaagaattttaatttgttttttttgatgattgttttttagtgggttttaggtttttttagtttattcgtatagttgtataaattaattttttttagttatttttttaatatatgtgtttttttagttttatttttttggttttaataattttttattgaattgttgtatgattttttatggtgatttttttttattattgtaacggataataaagttaatttgtttatttaagggtatgtttttcgtggtttttggtcggaggtattgatggtattttattaggcggttgtgaggaatgtatatatattgtatttggaatgaattattttttataaatatttgttatattttagtattatttatattttttaaggaggatattaaaatttagagaggtaaaggattttttttagggttatatggttcgtaagtagtagagatgggatgttataggggtaagttatgattttttatgaggggtgaggggtgtttttttttgtgtggattttgagtaagtgttttaatacgattaggagagatatatgatattgtacgtggttttattattttttttagttattgttattgtgaattaagagggttttggaggttgtagttgagttttgttttttttatcgtgtagtattttttttgttgtgtagtaaataatatatttttatttttttttttttgtatttagatttatttgttttgtatttgatagaaattttttaagattttggtaaatgaattaaattttttttgatagtattttagaattttttttattaatattatagtttaaaaaatttaattttaattaggaagttagggtgttaaatgtgggattagaattgtattttagaagggaagttatgggtttagttttagattttatattttgtgggatggagggaaagtttaagtaaggttaggttattgattaaaagataatagatgttttttttatttttaattggttttgtgttttttttttttttttgttttatttagttagaatatagcgaattttgttttatttgtttttgtttttaggttataattttaatgtaagatagaataattagtaaattagatttagaagaatagtatattattttaatagaaattaattttttatttgtagaaatagaaaaggtttttagtattttgggaggttgaggtaggcgaattataaggttaagagatcgagattattttggttaataaggtgaaattttatttttataaaaataaaaataaaaataaaaaaaaaattagttgggtgtagtggtacgcgtttgtagttttagttattattcgggaggttgaggtaggagaatcgtttgaattcgggaggcggaggttgtagtaagtcgagattatattattatattttatgtattttagtttggtgatagggcgagattttattttaaaaaaaaaaaaaaaaaaagaaagaaaagaaaagaaaagaaaaaagttttttttataaagtaataatgggaataaaatttggagtttaaaatattattttgtttaataatttttttagaaagtattaattgatatgtcgttgattttgtaattaaaatattaatgggatatgttattataattgatattattaagggttttttaagaaattaggtagaaattatgttagttttaaggagtagttataatattttttaagattttatttttaagtttaattttatatattgatgaaattttattttgaaggtcgagatttttattttgtagtagttaaaggtgttttataataataatagagtttagagtagtaaaataaaaatattatagattttgtaataaaataaatatgtattttatgttgtttttgatttttttagttttattattttgggtaaattatttagaatatttgagttttagggttattttttataatgtgggatgaaaattattagaagataattaatatgatgaaatgatagataagtataaattatatagttaaatataggttagtgtttgatatttagtaattatttttaagtgggagttgttatataaagataaatattaataatgataatgatagtaatattatatattgggttgggatagattattattttttttttatttatttaagtttttttttgtggtattttaggtatataggagtttgtgagttatagaaatattaagagatttttaggaaatagaatttttttgaagattgttgtatttgttagatttttttatgtaataaattattttaaaatttaatgatttttaataacgatttagtattttcgtatgattttgtaatatagatattttaaaatggggttaatagaaaatttttgtaagtgatgtttgataatgtttagagatatttttgttgttattattggggagggtgttattggtatgtattgggtagaggttaggggtgttgttatatattttgtaatgtatatggtagttttttataagaaaataattatttgaaataaaatgttaatagttttgaggttgagaagttttattttagattattttttaaatgtgaaaaaatgttttatttttagagtttatttttttgtatagatttaggtttttatgtgatattatatggttatcgtgtaaaggttttttttttatattttttatggtgtaaaaattttatggatattaatatttttacgatttaaagataataatgaatgtatgattattttaagtgtataggcgcggagaggaggataaatgagagtggaagtatttttttgtttttattttttttttttagtgtttattgtaagttttttaagttttattattttttaggtgtaagattgtttttgttaattttttttagttaatgggatatttttagagaaatattatagtaagaataatttttatttaatttgtattattgtaaataatttataaaatattttttttgtttgaggtattttttaaaatttttaaatattatatatatttggatttatttttttttaaagttgttagttattaaaatatttgaattatttttgtgttattatttttgtttttaatgttttggtaaaattataatttaaaatttttaggtaaaatgttttatatatatatgatgatttttggtaaatatatatgaataattttatataaatatttgtttttaaagtttttatttaaaattatttgttattttaaaattattaatgttaagtaaaaataattgtatagttgattgtggaggtgtgtgtttatatttttagtaatttaggtgattgaggtaggaagattatttgagttaaggagtttgaggttagtttgggaaatatagtgttataggatttttttttagtttagttaatgatagcgtttttgttatatagttataagaaattatatttatagataatttgaagggtgagtaggataatttgaaggttgagtattgggtgaaaaggaagaaaaggggaaatagaggtttttagtaaagtgagagaatgtattttttttttgttagtgggttttttattttatagattgaattttacgttttatttaaagaagaggggttatttttttttttgtcgtaaatggtgtaaatttttgtggtttcgttttagtttgtattttttttagtgtttaggttggttggaatttatttggggatttttttttatttggttgttttagtagtaagatttcgtttttaaaaataaataaatgaaaagatttatttaaagaacgtttataatatgtatattaggattggagagtttttaggaaaagaattaatcgttattaggcgtgaggaatattatttgttttttagtagttagttttataatttgatttagatgaattaagaattttagtttaatttaataagtatttattgattatatattatagtttttgtataaagtttttattaaataatttattttgtttagttgaagagtaatttggggttatggtgaaagtagatttgtatatgggagtaattttgcgtgtttttttatagaagattattagggagtagtattttttttatattatttttttgttattgtgtagtttatttaagagagttgtttaaagtaattagtttatttatataggagttgttattgataaagaattggtggggatgatattaaataataaacggaattgtttttgaaaggttattttataggtaatagagggtttagagtaaaattagtagtaatatattgtgtgtttatggaatataaaaaagtatatgataataattgtataatgaatgagagagagagaaatttggagtatattgagttaaggtatatttgaaagtatattatatataaatgtaaaattttagggtaaaaattaatttaaaagaaggtagaaaaataattttgaaaatgaataaacgtttaatagaattaataaaaaatatttagtaaaaataatttaattatgttgataattttatagatataattggtttagatatattaattaaatgataaagaagattagatagtaaaaatggtataattgaattataatttgtttataagaaatttattttaaatataaaggtatatttatattaaaagtaaaatgaatgaaattgtatattatgtaaataaaattaaaagaaaattaataaaaatttgttttaattttatttttttattttttaattttttgttttttttatttatattttattgtattatgttttgaaaatttgttgtagttattattttttattggtttattacgtagttttattatttagaataagagtagtttatatattatagttgtagtgttataatattttgtgttttttttttgatgtttttttttttgtgtttatgtgtttttattgtttaatttttatttatgagtgagaatatatggtgtttggttttttgtttttgtgttagtttgttgagaatgattatttttagttttatttatttttttgtaaaggatatgaatttatttttttttatggttgtatagtattttatggtgtatatgtgttatatttttttaatttaatttattattgatgggtattcgggttggttttaagttttttttattgtgaatagtgttgtaataaatatatatgtgtatgtgtttttatagtagaatgatttataattttttgggtatatgattaaaatggaattgttgggttaaatgatatttttggttttatatttttgaagaatcgttatattgttttttataatggttggattaatttttatttttattaatagtgtatagcgtttttatttttttatattttttttagtatttgttgttttttgattttttaatgattattattttgattggtaagagattgtatatttaaaaaattttattattttagtttaaaatttttttaagttgataagtaattttagtaaagttttagaatataaaattaatgtgtaaaaagtataagtatttttatatattaataatagataaataaagaattaaattatgagtgaatttttatttataattgttataaagagaataaaatatttaggaatataatttataagggatgtgaaggatttttttaaggggaattataaattattgtttaaggaaataagagaggatataaataaatggaaaaatattttatgtttatggataggaagaattagtattgtgataatggttatattggttaaagtaatttatagatttaatgttatttttattaagttattattgattttttttatagaattagaaaaaattattttaaattttatatggaattaaaaaagagttcgtatagtaagataattttaagtaaaaatagtaaatttggaggtattacgttatttgattttgaattatattagaaggttgtaataattaaagtagtatggtattggtattaaaatagatatatagattaatggaatataatagaggttttagaagtaatattatatatttataattatttgatatttgataaatttgataaaaataagtaatggggaaaggattttttatttaataaatggtgttgggaaaattggttagttatatgtagaaattgaaattggattatttttttaagttaaaaggatatattgagaattgattttttttttttttaggtttttatggtgattttttagtattatttgatttttaggttgtaggttagatttgttagtgtgttttttgatgtgttgaagttttgggttttgattttagggttgatgttttggaggtggtttgtggggttatagaaagatatatttttgaggagttgtcgtttttttttttttttttttttatttaaaaattaatttaagatggattaaagatttatatataaaatttaaaattataaaaattttagaagaaaatttaggtaatattagttaggatataggtaggggaaagattttaaaatattaaaaataatggtaatagatgttaaaattgataaatgggatttaattagattaaagagtttttgtatagtaaaagaaattattattagagtgaataggtaatttatagaatgggagaaaatttttgtaatttattaatttgataaagggttaatatttagaatttataaggaatttaaataaatttataagaaaaaaaataattttattaaatagtggtgaaaatatatgaatagatattttttaaaaggaagatatttatgtggttaataaatttatgaaaaaaagtttattattataggttattagagaaatgtaaattaaaattataatgagataattatgttaatattagataaagtagatgttagaataaggaatattattagggataaagggatattatttaatgataaggggttatttttttaaagatatataataattttaagtgtgtatgtatttaataatagagtatcgaaatatatgagataaaagtcgatagaaatgaaaggagaaatagaaaagttaaaaattttttgtatgaggtgtaaggaaggggtttagttttagttttttgtatatggttagttagttttttttaaaatttgtgaataatggagttaaagatttatttaaatatgaagatttttgttttgtaagaaattatatatagttatatattgttagattttttttaattattatttttattagatataagaaagtaagtatatatatttatatatatatgtatatacgagtatttgaaatattattagtttatgttataaagagtttttatatgaatgatttgttttaataaataagtgattattgaataaaagtattgtttttttaaagagtaggttaataagttatttaatatttagttaattaaaatttagatttgggattggagtagaagattagttaatatttgttattttttttattttagtattaaaggagggatgtgagtttatgatgaggatttttttgttgttttattttttaagtttttttttttgttgttattcgttttagtggagtttgtagtgattatttttttagttaggatagaggttagttattataatttgttggtttgtttggtgataaatttttttttttgttaagtgaaatttagatggttttagaaaaaataggagtagattgttggagttgtatttatatttatttagaatagggattagatttattagatttttgtaatgttagaaataatattcgagtatggagatgtttatatttattatttggagtattttagtttttagagttttattatagtagaatgatgtaaggagtattttattgatattataaatttaatggaaaaaaggaagggtgggggagttttgggttttgtgggggtgaggttattattaatttttgtttgttatatatttttatatttttttttttatataattgtatttcgatataatttttggattagtagttatggaagattgagattttattgttttaagttaaaatgtattttttgagaattgattttttttttttttagtttattatggtggtttttttgtattatttgatttttagattataggttagttttgtcggtgtgttttttgaggtgttatagttttaggttttgattttagggttgatgttttggagatggtttgtggggttatagaaggatatatttttgaggagttgttattttttttttttttttttttttatttatttatgttgttttttggggtttttgtttgtttgttattttttttgtttggtgatagattatttttgttttttatattttggataggattttaggtttttagatgaggatattgtggggtgtggggataggttttgatatataggtttttattttttagggatattgtttgaatttgtttagagtaagatgttgagtggtttttggggttttgtgttggggttgattttttttggtttgggttttgtggtttagttatttttggaataagaaaggtaaggtatttttgaagaagatggagagattggtgttgggattgaggttttttgttgtaattcgttttgtttgattttgtaatggaaaggtagttaaggtggggatggaaatagattatagaaattaggagtattgagagttttttggtttgggttatgtttgtattattatagaagggagtggtggagggttatttttaaatagatagggttttatttataggtaagatttttgttttttttgtttagaaatatgatatatataaggtggaaaaaagagttgagtgtgtttttttggatatttgaatatgttttagttattttgttgtttttgaatgaatgtggtatgaaataaaattttggaatattttggaaaaaattttggaaaaattttggaatgttttgaaaagtttttgttttaaattttagggattattttttagaataagattcgatttgtggtattagttatttagtgaggtttagatgatgtttttaaatttttaaattgtagagagtgttgttgaatttggtgataggtgagatgagagggaattatagttgttattattttagttagtttacgatttgtgtattattaaagtatttcgatatttttttttgttttttataggtttttttaagttgatgttttgtgtttattttaatagagtaaagtgtattttagatgtattgtgattttggttttagatagtattgtaagaaagttaaacgtattttttggttttttagtgtatataaaagttatgtttataatatatagtagtttattaagtgtgaaatggttttatgtttaaaaaagtgtatattttaattaaaatattttatggttaaaaatattaataattttttgagtttttagtgagttataatttttttgttgatagaaggttttttttttgatgttgatggttgttgttgtagtttgaggtggttgtgataattttttaaaatgaaagaataatgaagtttgttgtatagattgatttttttttttatgaaatattttttgtagtatgtgatgatgtttggtagtattttatttatagtagatttttttttaaaattgtagttaatttttttaaattttgttgttgtttttttaattaagttatgtaatattttaaattttttgttgttattttaataatatttatagtattttattaggggtagatttttttttaagaaattattttttttgtttatttataagtagtagttttttatttatttaagttttattataagattgtaataatttagttatatttttcggttttatttttaattcgagtttttttgttatttttatgatatttatagtttttttttttattgaagttttaaacgttttaaagttatttatgagggttggaattagttttttttaattttttgttaatgttgatatttcgatttttttttatgaattatgaatgtttttaatgatatttagaatggtgaaggttttttagaaggtttttaatttgttttttttagatttattagaggaattattgtttttgatagtaatagttttatgtaatatattaaataatacgatttgaaagttaaaattattttttgatttatgagttgtagaatggatgttgtattagtaggtatgaaaataatatttatttttttgtatatttttattagagtttttggatgattaggtattttgttaatgagtagtagtattttgagaggaatgtttttgtttgggtaatgggttttaataataggtttaaaatatttagttaattatattttaaataggtgtgttgttattaggtttcgttgttttatttatagagtataggcggagtagatttagtataatttttaagggttttagtatttttgaaatggtaaatgagtattggttttaatttaaagttatttgttgtattagtttttagtaagagagttagtttgatttttgaagttttgaagttagtattgatttttttttaattttgaaaattttagaagatatttttttttaatagaaggttgttttatttttattgaaaatttatgatttaatatggttatttttattagtgattttagttagattttttggataaattgttatagtttttatattattatttgttatattattttgtattttggtattatgaaggtggtttttttttttaagttttatgaattaatttttgttagatttagattttttttttgtagtttttttatattttttagtttttatagaattaaagagaatgagggtttttttttggattagattttggtttaagggaatgttgtggttggtttgatcgatttagattatttaaattttttttatattagtaataagattgttttatttttttattatttgtatgtttatttgagtagtagttttaattttttttttttaagatttttttttttgtttttataatttgattaattgttgaaagtaagagatttagattttagtttattttggtttttgatttgttttttttattaagtttaattatgtttagtttttgatttaaagtgagagataagtgattttatttagaggttattgtagggttattaattggtttaattttaatgtttttgtgtttttagggaatagggaggtttgaggagagggcgaaagagagggaggatggttggttagtggagtagtttgaatatatataatatttaataataaagttgattgttttatatgggtttagtttatggtgttttaaaataattataatagtaatattaaacgttattgattatagatcgatatgtaatagtaatgaaaacgtgaaatattataagaattacgaatatatgatatagagatataaagtgaggatatgttgttggtgaaatggtgttgatagatttgtttggtgtaattttttaatttttaaaaaattataatatttgagaagtataataaagtatagtataataaaatgaggtatttttgttgttatttttatttagttattaggaaaggtaacgaggagtaggtgttgatataagtttaattttagtgttttgataattgtagagaggttttaagggagggagggattgtgtttttttaggggttggtgtgatatgtgattgttttttttgttttttagagggtttacgtattgattgtaaatatttttttttttgggatttgttattttttttttgttttgttttggttttatttttgtttgtaatttttagttatttttttgttaggtttgtgagtaagttatttttgttagttgtgttatttattaggatatgatttttatggtgattgagaagtggttgttaggttgttgtttgtttttgttttttttaaatttttgtttgtaagaaattttttaaatgtttgtttattattatgataatgagagttttgttttttgttgtttgttgtttttgtttggattataagtatttttataagtttttattatttttttttgtttttgaagattgattatgaattaaatgttaaattttttataatttaataattagttttttaaaattaaatagatttgtgagttatttgtgtttttaattttgattgagtagggtagtggtgttggtgggaaatattgagttaagaaagggattagattttagaattttagtttagttatgatttttaaagaagataatgtttaggaaaggatatttaaaaattatgagtttttatatttggtttaagttaggtgttatataagaatgtgaaatgagatatgaaataaatttaattttttattattagtggggtttggaagttgggattgtgtgtagtagttttttttggtttttgtaatagtttgattagttttatttatttgtgtaagtagaattgttttgtattagttatggtatttaatgttataatttaattaaacggtattataaatattttttggtgagtatatcgtgttttttagggtaaaagataatgattgttgattttatttaatttttttaattgtataattattaatggaggttttattagaaagtagtattttggtagtttataatggaaattttattagattattttaaggggaaaaattaattttggggtttatgtaattaaagtttttaggtgaatttagtttttgaaaaacgtttagatattggatataaatgggatttttttttttttttttttttatttttttttttttgtttttttgattttttttttttttttttgtttttatttttttttgttagtgtatttttgttttattttattttatatttttttttgattgtttgtttttttttttttttttaaattttttttttatttttgtttgaaagattttttttttattaatatatttgatagttttttttttttcgatttgtatttttttttatatttatttttttgaatcgttgtttttttttttttttgtgatttttttttatatatatatgtgtgtgtgtatatgtatatgtatgtgtgtgtatatataatttattatttgttttttgggttgtttttttgtttattttttttttttttttttatttttttattggtttgtgtgttttattgttattttttttttgttattttatttgtttattgtttttttttttgtttatattttatgtttatgttgtttatttttttgtattttttagtttttgtttttttttgtgtgtatgtatttttttgttttttgtttgtgttttttgtgtaggtttttttgagttcggttttttttttattgattatttttatttttttttatggaagttaaatattttttatatggttatgaagatggatattttatatttttagtttattatttgaatagtaatagattaaatatgttagttttattttgataatttgacgaaagtttagtttgagtggtattttagttttttaattaattattttagttatgggatgtgggattttgattaattaggttttagatttgaatttatttttgtgttaggaatatagatttttttttttttaaataaagatggaaaaagattaaggttggataggttataatagtagtggtaataaaaataataattattataatttattatataaggtttttatatatgaagtttttttttttttttttttttttgtttttttttgtttttttttatattaaaaaatttagaagatgtttttttttagtataatatatgtagtttttatataattgaagttttatttgttttattttaaaatgagaaaattttaaattataaaaatttttaattttaggaattttggtgatatgaatttttttttaattgttttgaatatgatttttattggttttataaattatgatgaaataatagataaatttatttttaatataggtggaaataataatataattataatgaaattataattaacgattatttttgtttaatgtgatgagatattgaaacgttaggtgaaatttgttgttcgttgttgttttatggggatgtgattttttatggagaaagaacgagttattaggatttaaatgtaaaagtagttggagttatgtaatagggtattttttatatatagtttttaatatgtgtttgttattattgtttattttggagggagttattaaggaaaatgtggttggtaaaattagggtagatattaatattatttgagatttgttatgtttatgtgagttttttttgttatgaacgtttttaggtatagatttttaagatgttttgttattaaggttttttagtgaggagttaatagtagtttagtttttggagttttgtttttatttaaggtttaaataattagattggatagttatgaaatattagattttatttatttatgattttagatgtgtgggagtattttgtttttagttttttttatattttttagtttatattattggttttatttaataaaagaaataatagaaaggtattaggggaaggaggaattatttttgatttgttatatttttaatttttatatttagttagttggtgaattttattaattaaatgataaaatattttttaatttagtttattttatttattttttttgtagttatttgattttagtatattgtcgtattttttttgaattgttgaaatagttttttattttatttttttattttttttttgatttttatagtttattttttatataattgttagaaatgtttataaaatttaatttttattatatttgtattatgattaaatattttatatgtttttttatagtatttagaattaaatttagattttttatttggttaattaaattttttgtttggttaataaaattttttgtgatttgttttttgtttatattattgaatttattgtttattttttaattgttttattttattagtttgggtaatattagttgttatacggaataaagataaaaattttaggggattagttaaatagatattttttttttatttatataatagtttattgttagattgttaatagtttagatatttttttttatatagtgatttaggaatttaggttttttatatgttgtgattttgtttttttattggatttttgttttttgtttttaatgatgaaaggtaaaagagagagggtggagaaggtatatttattatttaattttttggtgtgttagtaatatattttatttttagttatattttatggtgagaattagtgatgtgattttatttagatgaaaatgcgtgaaagtggagtttttatttggattgttatttttgagtaatattattaagtagtaggaggaggagtgtataaattttggtggaaatttagttatttttgttattgattttatttttgtttttttaatattttaggtttagtttacgttaggatggttttttttgtttggaatatttttttttttgattgttatatgtatattgttttttttttagtttttttatgttatttttgttttaatttaaatataatttaagaaaagatttttttgatgattaaatttggagttgttatttagttatttttagttaaatattaattttttttatattagttattatatttgtgaaagttatatatttaattgtgagatttggtagttgaataattatttttaaaagttaattgtagttgagaatagttagaatgatttgtaaatatataatgtggtaaatattttattttaattgaagtaaatatatgtatatatgtatatttgtttggtagtatgttgatatagaattaaatttttatttggagaatgtatttgttgtttagagttttaggttattttaaatggttaaataatatttataataaattttttatcgtattaaattttagttttttaaaaagtttatgagaatttagagtgaaatattataaagaattttgaatttagaaattttttagatttttattttattttttttattttaaaagttattttatttatatttaatttaataatattttattagataatttatcgttattatttttaaagtatttaatggtttaagaatttaaaattttttttttaaaatttatttttaatttataatgaaatatttattttatttaaatatataattataataataagttaatagagatgaatagatttgtgagtaaacgttagtaatttttggtaaatattaaatttaattaatggaagtagaaatatataggaaggttaaagaatagttgtgagttgttggtatgttacgggtattagtttgtttattgaagaaatgaaatatgttagttaaattaataaattaatttaatgaaattgtttattttatttggttattttgtttttatttaattgattataatataaatatataattttttatttttttggtttttgttaatttattgatttataattattatttattatttatttatttatttatttagagtataaaattaaaagagagattttgtttattttgtttaataatattttaagtatttagaatattgtttggtatatagtaggtgtttaataaatatttgttggttgattatatgatgattttttttttaggaatttatttgttttttaaatttttcgtttttttttgggaatgttttggtatttttgggttaatattatatattattattttataatatattttgatatttagggtgtttttttttttatttttgatttttttttgtaaaatttttttggttatttttgtttattgatatatatatggtggtagtggtggtaatatttttataaggtagaattttattattattatttagtattaatttttgtgttttttatattttttttttatgaatatgaaatgatgttgtttaaaatggtattttaaaaatttttaatattgtattttttatagaaatataatgttttattatataagatttttaaattaataattttattatatatttttattaattgtatagtttatttttgaaattattttgtgtattttttttgtttatagttataatatttgttaaaaatgatagtttttttttttttttaaattttatagttttttttttttttgtttgtattgtattggaagggatatataataaatatttagtagatgttatagttgttatttttgttttgtttttgagtttattagatatgttaatattgaagtttttattttaagattttgttttaggtttttaatgttagaaataagagaaaataattattatttaatttttatgaattagggaaaatatgttaagaagagatgggttttttatggtattttatttattatttaaaatgtaagttttatatggattttaaatatagttaattttttgatgttgtttaagttttttattttgttttggttttttatgaaaaaataaagaggtaattagttgtttattgggatttagtgtgttgaacgaaaatttttaagaagaagattaattttaggggtaattgggaggagggttttcgtgttttggttttgagggtaaagatgttgaggattttttttgattaaggtaataaatgattattgaaaatagatacgattttagaatttatatttttatatatagtgttaattagagtaggagtttaagttataatttatttatttattatagaagagggtgttgagttgttattaaagaggttttttattttgtttgtttaagtggtagatatggagtattgaatagttatagagaataaaatttattttagttgattttgagtggaaaggagtttattatagattttaatatagtttagagaattattaggataatagaaggaattgaattaggtaattaaggaaattatttttttttttataattaggaatttatgttgtttagagtagttatatttgggaagtttttttatttagtaagtttttacgattatttgttataatttgtattagtaatagatacgttgtatgttgtttttttatatttatgaagttagttattagatatgaaaattttttttaattttgataagaaaataaggtatttttatattggtgtttttttaggtaaaaaaaaaaaaaaaaaaaaagatttttagtatgtttaaaatttattagaatgtttttgattggttaaatttaaatgatattaaatgttatttaggaaatgttttttttagttgtatattttttgtagtataggagaaatgtattggaagaggttgagaggtatgttgtatgataatttattatatatgggaatagggatatttaaatttttttttgtattttttttagtaatataatttttagatttaattttttgtaatggaaattaggagggatggttttattatagaatagataatgtatatgttaataatttttttttttttttttttttttttttttgagacggagtttcgttgtcgtttaggtcggagtgtagtggcgcgatttcggtttattgtaggtttcgttttcggggtttacgttatttttttgttttagtttttcgagtagttgggattataggcgttcgttatttcgtttagttaattttttgtatttttagtagagacggggttttattgtgttagttaggatggtttcgattttttgattttgtgattcgttcgtttcggttttttaaagtgttgggattataggcgtgagttatcgcgttcggttatatgttaataatttttaggtttaatagattttttttatttaatatattattattattaataataattttttgttaatttagtgttaaggagaaataattgatatgtttgtcgtttattttatattttaagttatttttatggtttgttttttttaatgaatggtaagtttattatttttttttaattttttaagttataggttttggttttagtttagagaagttagtattattataatgttttttttagtcggttgtggttaggaagtttttagaaaattatagggtaattcgagtagtttttttataatgtgtttttttttatggttttatttattttataatataatatttttttgtcgtttaataaattttagtatattaattttttatttgtttttttaatatgtagatttgtttttttattagtagtttttatttatgtttttgttgtgtggagtggtttgttatagattttgaatagttggtttttttttagtatttaggtttttttttaaatagagtatttttagagtaataatttttagttatttaatttaaagaagtttttttaaattatttttaattatttttgttttttttttttagagagtatttattattatatgataattattttttatttatttgatttttttgatagtagtaattttatttgttttataaaatattgtttttttaatttagattattaagtagtttgtattagataataatataaataaaatttatataaattaattattagtatattaatttttattttagttagatgatattgaattaattatatagtaattaatatatatgttaaataagtaattatttttattttaagttttattttttttttgttatattattatgttttagttttaaattgtgtagtagatttagtttttttttatttttaattatgattttagttttttatataattatgatttagttttaattttatttaatttttagtgttaagtagttttttattatttttatttgtttttcgaattaattatatttggataagagttatttttatattaaagtaaaatttagtgtaaataagttttttttaaatatatatatatatatatatatatatatatatttggttttataaacgagattttaaattttttttttttatggttggaagtttgaaataatgtaaataagtaattttgttttaatttttttttatttttagtattaaatggaaattaaattaaaataagttaaattattataaaagataaaaatttttatattaaaagagtaattaataataaatattttaatatattttttaaataagagaaattttcgttttattatgttggtaattttagtgaaaagttgtatttaaagttttaaaagaaaattattttttaggtcgggcgcggtggtttacgtttgtaattttagtattttgggaggtcgaggcgggcggattacgaggttaggagatcgagattattttggttaatacggtgaaatttcgtttttattaaaaatataaaaaattagtcgggcgtggtagcgggtatttgtagttttagttattcgggaggttgaggtaggagaatggtgtgaattcgggaggtggagtttgtagtgagtcgagatcgcgttattgtattttagtttgggcgatagagcgagatttcgttttaaaaaaaaaaaaaaaaaaaagaaaattattttttaaaagattttttgattttagtattaagtgtaaaagataaaattttgtaaaattataagatttttatttaaatatgaataattagttaagaaaagaatgttttttttatgaatatgaaatggggtatagattattggagtaattttttttttttatgatatgagttataatgaaaaaataaattgtagtttatatggtttggttgtgttcgtatttaaattttattttgaattgtagtttttataatttttacgtgatttgggagggatttagttagaagtaattgaattaggggagtgggatttttttgtgttgtttttgtaatagttttataagatttgatggttttgtaaatgggagtttttttgaataaatttttttttgtttgttgttatgtaagatatgtttttgttttttttttgttttttattatgattgtgaggtttttttagttatgtggaattatgtgtttattaaattttttttttttataaattatttagtattggatatgtttttattagaagcgtgagaatagattaatatagtagttattttacggtagtttattaggaatattttttttattagaatatgttaaatatttttttatattattagtttttgtgaggttcgattgttaaaaagagtttggaattttttttttttttttttttttttatttttcgttatgtggtatttgtatatgttagtttttttttttttgttataagtggaagtattttgaggtttttattagatgtagatgttggtgttatgttttttgtataatttgaaaattattagttaaataaatttttttttattaaaaaagtatatattgaatatttaaattgatgtaatgtaataaaacgtatttaatttaattttattattattttttttttttaatgtgttttttggggttagttaattttttattttgaatgagtatttaggaaggttttataatttttttgataatgtttaagtaaaaaaagaaaggtatttaattagttttatttaatagttaaatttttatattttatttaaaacggaggttttatatttttgtttatttaagagtgttgtagatgagaagtttataaatagtgaaggtgtaaaattagttttttttgtttttatagtttgtgtttttaatttttttacgtgatatagttttagatttttgcgagttgaggtatgaagagtagaagaggatagtttttatttgtttgatattttatgtgtttgaattgaatgttgtagggaaaatagatgtataagaagattttattgtgaatatttttatgaattttttgagaatttatatttttttagtttagagttcggtgagggttattgtatttttatttttatggaatttttagttattaggtattttggaatattagtagttttttttttttatgatttgttttttttggaggttgttttgagatattaagataagtagattttagattttttttttatttttggtttatgtcgattgttaaggaaagatgaatttttttttttttggaagttaggtaaattttagtgtagttatttgtttttttttttgtttgaaaatggtacgtgagtgttaggaaggtaagagtgtggtttttttaaatgatagggaagtagggagtagaagtgttgggtagaggagggtatggtttttggttagggttttatttttacggatttaggtgagaataggtattttttgtttaaatgttgtattttttaagattattttggtttgttatgttttattttgtgtttataaaaatttgagattttagtaaggtagggatagaagttgttggacgttgagagagagtatattagtagaggaatatatttattggggttttaggagttgtaaatatttatttttagatattgttttgggattagagttttatagtttgattatttgtatgtttttttggaggtttgagtagcgggtattggagaagagagttatatcgtattttttgtaaggggaataagggaattttttttgttttaaaaatatgtagttaagttgatttttggattttagtattttttagtatattttaggtattaatttattgaattgtttaaattttggaatatgtatgtatattaaattttttaagaggtttttttataagaaggtttttaaaatttgaaatttattatttattaaaaatatttttggttgggtatggtggtttatatttataattttagtattttgggaggttgaggcgggtagattatttgaggttaggagttcgagattagtttggttaatatggtgaaattttgattttattaaaaatataaaaattagttaggtgttgtggtgtatgtttgtaattttagttatttgggaggttgaggtaggagaattatttgaatttgggaggtagaggttgtagtgaaatgagattgtattattgtattttagtttgggtagtagaatgagattttgtttaaatatatatatatatatatatatatgtgtgtgtgtatatatatttgagaaaattgttttgtgttagaaagtgttggaggtattaaagatataatagaaataaggtagaaaaaattatttttgtttttatgggacgtatattttagtggtttaggaatagattatagataatattttaaaaggtatattagttagtatattagttatttgttgttataataatgttgtattataaataatataaattattagtggtagataataatatgtttatatgtttgggttagttaggtggtattgttaattttggttaagtttatttatgtatttaaggtggatttttttttatatgttttttattttttttttagggtcggtggatttgtttagaaatgtttttatggtaatgtagaagtaagtaaaatgttagttttaatatatacgttaattttaaggtttagagtgtgtgatatttgttaataattttttggttgtagaggaatatatggttaggtttaatgttgagaggtaatttaagttatttatttataatgggagagtatagtaaagttagattgtaaagggcgtggatatagggagggatgatgaattaggattattattataatttattatagtttatttttattgttataattttttatatttttttaatatgaaaaatatgtttatttttaatttgggattattagaagttttatgtaattatggtattagttattaagtttaaaattttataattaggatgtaggttagaatgtagttttttttaatttagaaatatattgatagagttggagttttgttatttcggataaatatcgttattttaaattttagttttttttttagttttatgtattttaaggaaattattttttttttaattataaatagttagaaagagtagatagtaaaatatagataagagagtttgggtatagagaaaggtggggggaaggttttttgggtaattgttaaattttatttttatataatgggttttaaaatagtgggttttaataagtatatttttttttttttaggtgtattaagatagggaagttaaaagtagattttggggatatgtttgtagttgtaaaaaagatgtatgggaatagatatataatttttttttttagataagtataataaagagatatagaagtagtttaagttttggataaatttttttattttgaatttttaaaaaatttagtttataagagagcgtgtttttgatttaattcggttagaaggcgttttttaggtttgttttttttaaaataagtgtgtcgtgattggtgagttatttttttatgtgttttttttttttttttttttttttttttttttttttttttttttttttttttttttttttttttttttttttttttgtttgttttgagatggagttttattttgtcgattgagtgtagtggcgttatttcggtttattataatttttgttttttgggtttaagtgatttttttgttttagttttttgaatagttgggattataggcgtgtgttattatatttggtttattttttgtatttttagtagagatatacggttttatcgtgttagttaggatggtttttattttttgattttatgatttatttgttttagttttttaaagtgttggaattataggtttgagttattgcgttcggttttttttttcgttaattttaagatatataagttataataatagaaataaagttgtttttttattagtatttaatatatagtgttgaaattgggttaggataatgatagtaaatatgtttatttaaaaacggaaagaatgggggattgaatagttattgatttttggtaattttgaaattttattgaataaatgttgttttgtatattttttttaggggtggataatattttttgattagtttttgatttttttttttgggagttttttattagtttatttgtttttagaattttgtgtttttttttttgaaaagtatttttttttttgtttttttttttggttatttttaaagagtatataggatgatcggtattttgaataatttttttagtttgttttttttatatagagagttgtagatttattgtttttttatattttaaataattttagttttttttagtttagattggtggtagttttattaatatagttgaataaaaaacgttgtgagttttttatatatttgattttatgatattttgaatgttaatagttttattaataattttttgggagatataaagttttttttagatttaattatttagtataaaagagttttaaattaattttatttaattatatagttataaatattaaggaatatatagtaaagaaaaagatttataatttaaaaaagaatatgaatgtggaattttttagatacggaatttaaataaaagaaattagagtatattatttaaaattaaaatttaatgggtgaatttaatagtagattggttataggtaaatgtagtaatagttaatttgaagatagtttaatagaaagtatttattttgaagtatagtataagataaaatgaagaagaaagatattagtattagagatatgtaggtattatttaatggttaaatatatttataattgtatataaaaataaaggataaagagtgtagtagagaaaataaaaagataatggtagaaaattttttaaaattgattaacgatgttaaaatatagatataagaaatttattaattttaattatagattagtgaaataaaattatatgtaaaaaaaaaataataaattgtttaaaattaaagataaagagaaaatgtttaaattagttagagacgaaagtgttttgtttttggaaaaaaagaataaaaaaggttaaggttgatttttaatagaaattttggaatttggaggaaaatggaatgaaattttaaaatacgttaagaaaatttttatttttaatataaatttagaattttaaaattagaaaaatattttttaataataaagttgaagaggatttttttgtgacggttaagttggaataagtttattatagtttgtattttatattaattataatgggaaatattaggtagaatataaaaggtagttatttgtggattttgaaaagtataaaatagtatgaatattagggagggaagttagaatttggagaaataatagtaagggagtgagtttttagggtttttttttttttgttttttggttttgatttgaaggtaattttagatatgtagtgtgtagtgagagtagagagaagaaattttaagagatattttttttttttgtatagattgtaaagggggtttttagagagtgtgtggagtaatattttttttttggaattttatttttttttttatttttagtttttttttgagtgtggttagaattaggaagttgtattaaggttgttgtggtggaattattaaaaattttgaaagaaatattttaaaagaattagggaaaaggaattttgtggtttaaggaatatggggtatttttttttatatttttgtttaattttttttttttattttgttttaagggaagttttagttgtgtagaattatatgataatattttgagagaaattaatttttttggttagaggaatcggtaagagggatttatgggatttggagagtgtgggaaaaattttagaggagagagtgagagaaagggatttttaattttatatatgaattattataatttttagggttttgggttttttaagtcgtacgagggggatagttttatattagtatattaaagttattaggagttgaattatgatataaatattatagttttagtgttagattagtggttgagaggtttaggtatagggtaggtacgaatagtatggtaaagtttttgaaaattataatgacgttagaattacggcgtatagaaagcgagatatagtttgtattttaaatttgatgagattagtttttgttaaaataaaaaatttaatttttttttagaattttaatgggatttagagtttatagtgtaatataattatgtattatataacgatagtttagttaaggaaggaatatatataagttggttattacgagattataatggagttgaaaattttttatttttatataatagttattgtaatattgtagtataatgtattatttataagtttgtggtgatgttggcgtaaataaattttttgtgttgttagttatataaaagtatagtaatataattatgtatagtatataatatttaataatgataataaatgattacggtattggtatatgtatatattatattatatattatatagacgtttttttttgttaattattataagatttagtttttgtttcggaggattgtattagttaagtgtattttattgttattttagagtgtatttttttttataaaaagaaaattaattataaaatagttttaggtagatttttaaggaggtatttttgaagaaaatattgttattataggaagtgatagttttatgtgtgtttgtgttattgtttttaaaggttttttaatgggataaaatgggaaagtgtaagataatgatattgatgattttgattttgtgtaggtttgagttaacgtgtgtgtttgaattttaattgtttagaaaaaaaaaagtataaaaagtaaaaggtttagaaaaaagtttaaataataaagatatagagaaagaaaatatatttgtataattttaagtgtgtttgtgttttaagttaagtgttattatatgagttaaaaagtttataataatttagaaagtttataaagtaaaaagggtatataaattaaggttaatttattattgaagaaagattttttttttgtaatttagtgtaggttgtgtatagtgtttacgaaatatttaatggtgtataataaagatttagatttttatttatttattatttattcgttgatttatttagagtaatttttagttttgtaagttttatttatgataagggttttatataagtgtacgagtttttatttttgataattttataatataatataaaataatttgtttagatttagatttgttttagttaatgtaaaatttaagagaaaataattttgattaagttatttaaaattatatttttatatttatgttttttttaatgtttatttgtaggggtgaaatttggattaaatatatttttttgagttgtaggatataaaagttttatttattatttttaattttttattttgttattttttgtaatttattatattaatgatttattttttttttttttttattttttttttagggtattttgtttttttatgaaatatttattttttttttattgttttgttttgtgttatatataagaggtttattatatttaatttttaatttttattaattttgatatatataatttgttataaaatattattggtgatgtttttgttgaggttttgttattataaaatttttttataaagagttttatggtttaaaagaagatatttttgttatttttttttattttgtttatatatatatgttttatataattttttaattttgaatttagattaggttttttaatgaagttgttatggagtagaattattataatttttaataataattaattttttttttaaagtttatatttttgaagggaattggattttaaatttatattagtaaaaatgatttttattttttttaaatttaaatattttatatgttttgaaagataaattttttagagtaaatttaatttgtattttttattttggatttttatttagaagagtaattaataatttgtattgttattttttagtttatgattgaagagtaagatttttataattgaggatttaatagtagcgttttttttagattgatatataatttaagtatagagttgtataaatatgtatatagagtttaataaataattaatgatatagattaaaaagtttatttagttttttagaagttttgtgtgtgtattttttatttattattttttttttggaggaaaatattattttgattttgtgttaattatttattttttaaaaatgtgtgtatggttttaaattttatataaataaaataatgtattggatttgttttttttttttgataaatattgtttttacgagatttattattttttttatgtgtagttgtgtatatatacgttaggatggttattatttaaaaggaaaaaagagaatataagtgttgttgtggatgtggagaaattggaatttttgtgttttgttggcgggaatgtaaaatgatgtagttgttgtggaaaaaggtagagttataatttaaaaattttaaatatataattattatatgatgttatgattttatttttggttatatatttaaaaaaattgaaaggagagatttgaatatatattagtatatttatgtttatagtataaacgttaatggtagttaaaaggtgaaataaataaataaataaatttttattaatggatgtttggaaaagtaaaatgtggtataaatatataatggaatattatttagttttaaaaaggaaggaaattttgaaaatatgttataatttagatgaaatgtaaagatattatgtgaagtgaaataagttagttataaaaaaggtagatattgtatgattttattttatgagattattttgagtgattaaatagagatagaaagtagaatggtggttattagtggttgggaggaggaaggaataaggagttgtttatggttatagagttttagtttgggatgaggaaaagttttggagatttgtggtggttattgtgtataatagtgtgaatatatttaatgttattgaattgtatatttaaaaaggtgaaaatgatgagttttagtttatttatatttttttataattaaggagagaaggaaggaaggaaggaaggaaggaaggaaggaaggaagaaagaaagaaagagaaagaaagaaagagagagagagaaagaaagaaagagagagagagagaaagaaagaaggaaaagaaagaaagaaaataaaggaaaagtttaatgtttagaattggtgtaaagatgtataagattaataagtttaagtaaaaatgatgtttagtgtaagttatatttggtttttagagtttgggtattgaaattggagttttaagtatagattatataagttatatttttagataatattatttgaggtttatgtatgttataaaataggtttaagtgttttatatgtattatattatgggtttttttaataatttattttgtggttattaaaggattatattgtatgtaaatataaaatattatattaatgaaattttagttaatttataaagttttataaaataaaaatagtttaaattgtaatgttgttaataattataatttatgagtttgagtacggagtaaatttagattgtgtttttattattattaaatgatgtatatttatttatttagtttacggtttttatttttttttttttatttatgttaatttaaatagtgatatatatagtgttatgtagttataaaaaatgatgagtttatattttttgtagggatttggatgaaattggaaattattatttttagtaaattatcgtaagaataaaaaattaaatatcgtgtatttttatttataggtgggaattgaataatgagattatatggatataggaaggggaatattatattttggggattgtggtggggtcgggggaggggggagggatagtattgggagatatatttaatgttagatgatatattagtgggtgtagcgtattagtatggtatatgtatatatatgtaattaatttgtataatgtgtatatgtattttaaaatttagagtgtaattaaaaaaaaataaaaaaaataaaaaaaaaaaaataatttaaaaaaaaaaattatttttaggcgttatatgtataaagtgtatataaaatataaatgtataaaaaaaaaaagagttaaagaaagaggaaagaaatataaaaagtggtttaatagttaaagataggtttattttggagaataaatttgagagggtttttggttgattttagttaggagtttttttttttatagattaagagtatttaagggtttggggcgaaaggtttgaatgtttttgtgtggagaagaagtttattgtggggttggaatgtttttggttggaggggaggttattttgggtttggtattttttcggttagaggggaggttattttggggttggtatgtttttggttggagaggggtttattttagggttggaatgtttttggttagaggtattatttgtggtttaaggttatgttgttattagttattaggttgatgttttttgggttggatttaggtggtttttgattaaggggaattttaaaatggtggtgtatgtttaaaatggcgatgtttttgttttgttaatttagattttatagttataaaaggatgaggatggtgtgttttttttggttaatttttgttgaggggggtgtggagagttttttggttttagattgattgtaggagtaatgtcgtttgtagatgtttttgggtagttgtttgtgaaatggttatgattttgttggttaaaaatttttggaaaagattaattaggtagggtaagaaagttagttttaggtatattattaggagagggtttaggaatggggtgatttatgttatgattttgtttttaaattaagaatttatttggttgtgttggtatttttttagttttttagttttttttttaagttttacggtagtattttttattacgttcgattggttgagatagaaataattttttttatttagttagaggtagatgtttttttttttaattattataagatttagtttttgtttgttttggaggattgtattagttaaggagtttagttggttttggatttttataaggttttaggttatattttttagagatttttgtagttttgtcgaaagaattttaaagtatgtggttaatttatttgttttttttttaagtttagaggttatatttaaggtagttattaaggaatgatgtggatggtttttttttttttaatatattggatggatgggatagataaaggttgattaggaggagttagtttaatggaaggagaaagataaattagagaataggtttcggttcggttggtggggagataaagatatgtgttggtgttatataaaaagaataagtttttatcgtaaatataggtagagatatggaaagagaataagtgtgttaaagattggatgttgttttttttttgtagttttttattttagatggataaggaggaggttagggagatatttattatagtagagatatagtaagagttgttttttatacgtttattgtgatcggatgttgtattattgatattgagttatggaaaaaggtaggaattagggatagtataagttagtttagaggtattggttaagggataggttgtaaaataagttagatgtagaaacgttttatttgttttaggtgataatttggtaattagtttggttagtttgatggttagaggggtgtttaataatgatagtgtagttgtattggttaggtgtgaaggattttatagggaaattttttttagaagttgaaaagtaaagtgaggtttattgtaaaaggggggtgtgtttagttataggttttttaatgtcggggttttggggtttgaagtattgtagggagttgtaataggtttgaaataatttgttagtttgattggttttggaagtgggataatcgtcgattatagtcgtagtgtagtgttaatattattaattattagtgttttcgtaattttagtattttttattattttaattttattaattattttcgagtttgttgttgtttttatttaagtttatgtttttatattattagtaagtttttatttgtatgataatatataatgatttattaaatatttgtttattatatagttgtatttagtttttgattattaataggagttttttcggtttttttaataatatttggtttggttatatgattttattttaattttattatttttttaattttaggtttattaattaatatattgattatatattagtgatgacgtgatattgttcgagaaagtatattttaaggttattatataataattgttttaaaagatttttaatacgggatgtttttatttattattttagaagtattttttttcgttggtttttttttgggtattttattattttagtttagtatcgattttagaattaggaggatattgatttttaataggtattttttttttgaattttttagaagtattttttttaaatacgtttgtattatttgtattaggagttttaattatttgagtttattatagtttaatagaaggtaattaaaaataaataatttaagtagtatttattacgatttttttaggagtttattttatttttttataagttttagaatatttcgaggtttttttattatttttgatggaatttatggtttaatattttttgtagttataggtttttatggattttatgttattattggattaataatttttattatttgtttttttgttaattaaaattttattttaggtttattatggtggtttatttttgtaattttagtattttgggaggttaaggtgggtagattatttgaggtcgggagttcgagattagtttgattaatatggagaaatttcgtttttattaaaaatataaaattagtcgggtatggtggcgtatgtttataattttagttatttgggaaggttgaagtaggagaattgttttaaatgatcgtttttttttatttttttaaagtgttgggattataggtgtgagttattatatttagtttagttttgttaatttttttgtttgttggttttttgttttattgttgtttggttttatttttattaatttttttttttttttatttgtttttgttatatttaattattttttttttttatttattttattttaagttttgggatatatgtgtttaatatgtaggtttgttatataggtatatatgcgttatggtggtttgttgtatttgttaatttattatttgggttttaagatttgtatgtattaggtatttgtttaatgtttatttttttttttttttttattttttaattggtttcggtttgtgatgtttttttttttgtgtgtttttattgttgagatatgtgagatttggatatgtatttttattgtttaatttttatttatgagtgagaatatgcggtgtttgattttttgtttttgtgttagtttgttgaggatgatggtttttagtttcgtttatgtttttgcgaaggatatgaatttatttttttttatggttgtatagtattttatggtgaatatgtgttatattttttttatttagtttattattgatgggtatttgggttggttttatatttttgttttttaattttttttttttattttttattttttttagatttagtttgtttttttttttttatttttttaaggtagaagtttatattattgattttaaatttttttttagttttgatgtatatatttaaagaaattaatttttttttaagtatttttttagttttattttatatattttgatataatgaattttatgattatttatttaaaatattttttaattttttttgtaatttttttttagatttatggtttatttggtagtatgttgattaatttttgtatatttaggggatttttaggttattagtttggtgttgttttttaatttagttgaggtatttttatttttattttttttggttagagaatatattttatttagtttgtatattgttgaattttttgagattaaatttatgatttagtatgttgtttattttgatggatattttatgtatatttgaaataatatgtattttgttattgtatattttagtttaatgttttataagtgttagttaggttgatttaattattagtgttattttattgtttaatatatttttttgattttttgtttattttttttattaattattgggagaagtatttaaaaatttttaattacgattgtaaatttatttatatttttatttttgttaatttttgtattatttatttttaagttatattattagatgtatatatatttagaaaagttatgttttttttatggtttttttattattatgatttaagttttatttttatttttggtaaaatatatttttaatgaagattttttttgttattaatatgattaaattgaatttattgtgatttaggtatttgtggtatgtatttttttttttggttattttttgtttatttgtgtaaagagtatgtatttattattttttgaatatatttttatttttgatatttgatacgtatttattatttttttttttttttttttttttttttttttttgagaaggagtttcgtttttgtcgtttaggttggagtgtagtggcgcgatttcggtttacggtaagtttcgtttttagggtttattttattgttttgttttagttttttaagtagttgggattataggcgttcgttattacgttcggtaattttttttttgtattttttagtagaggcggggttttatcgtgttagttaggatgttgtcgattttttgatttcgtgattcgtttgtttcggtttttttaagtgttgggattataggtatgagttatcgcgtttggtcgtatttattatttttaaatatttttattttttatgattattttttatttttttttttaagttttagaatttgttatagttttgggtttttttagaagagtttggttaaaaagttagattaagatttgtgtgttaagtgtgtttattgttatgggaatgttaaaagtttaagattttatttgtggatatatatataaatatttatatatttatttttatagttatttatttatattaaaaattatatgtttacgtttagtttttttagaaataaaaattatgaaatttataaaaatgatttaaaaatttgtaattattggagattttttgaagtatgtagaatatattaggagataaatattgagaaaaggaaagtaattaggtgagtttaacgtttattgtgagttttttttgagagtgttttttagtttaaagtagtagatggtagaataaagtttaagtagaaagatgtagttttattaggaagagaagacggaggttggagtttggtgtcgaaagaattagttgttattgaggagaaaaatttttaaaaattatgaaaatttaaagaggggtttttattttgtatgtaaattttttttaaatgtagaattttgggtttttttttgtggtatttttatttaggattttttatttaagttttataaatagtgcgttattgtattttagtttgggtaatagagtaagattttgttttaaataaaataaaataaaaattgttttaaagttttataaattttaaagatttaagttttgatatttttttatttagttattattaggagggagaaaaatatattaagaaaggtaagtaaagaggaataagagaaaaagaatagatggattaaaaataaaaagtagtaagggggtagatttaaatttagtattttagtaattatattaaatgtatatttttaaattggataaataagtaagatttttgattatatattgtttataagaaatgtattttaagtatgaagatataggttaaaaatataaggatgaaaaaatatatattgggtaagaaagttggagtggttatattaatattagataaagaaaattttataaataaggaatattattggagataaattttttataatgaaaaagagttaatatattaaaaagatatattattttaagtgtgtatgtattaaatgttatatatagtttatttttaaatttacgtagaaaatatataaaaatatattatatatattgatattaaaatattttaacgaatttaaaaagtagtgagaatattggataacgttgttataaataattatttaaagattttggaaattgattaaaggatacgaatattgagaagtatttagttaagagaatttaaattgaattttaataaaaatagtaaaattagtattattttggttagagtatgtttttattaattttttttattttaatttatggtgtagaatttttatttgtgtgggaggataggttatgggattagatagttttttttaatttgttagagggagtttatatatattttttggaaaagagtttacgtatatgtatgtatatatatatatatatatatatttttaaaataacgttttggcgttttgtagaaaatagtatagattttagggtaaataattatggaaggttaatattttaattagtttgaagttatgatggtaggttagttaggaattttattagggagatttagagaatgagatagttaaaaatagttttgttaaaattttatttatttttagtggtgtggaaagttgtttgtattagtttggttaagtttgtttaggagagatttggttgaatataaggatatgtgaaggtagaaagtaaaaattgggatatatttgtaaagtttcggaattttgaaagtattttttatattttatttagtttaatggtaaagtgtggaagttttattgatttaattgtttaagtagaattttttattaattataggttgatattaagttatgatgattaggggtgattgtaggaaattaggtttaataatgaaaataaaaattattaaataaatttagtagagatattataggttgtatattagggggaaatagatttggaagaattagtttaagtaagttattaatataaataataaatagtaagagtatttatttttagggattgtggaattagaatttatgtaaaatattaatattaaataaaaattataagatatgtaaagaaattggaaaattttattaatatataatatataggaaaaaaagaagttaatagaatttgtttttgaggagataggttaaaatgattttattttaaattgtttttatttttgagtataatgaagaaatattttttaaggtaggtgagaaataattaagtagttattaattagagtgtttaagtagtggttttgagttttaaaaaaaataggagggtgggaaagaaagtataaaagaaattagatttttgttttaattattttggaatatataaaattgtgaaaatatgttgagaaagttttatttatatagttatttttaattgttgtataataggtgtgtcggaaaaatagaaaaaatataggatataataaaaaatcgaagatttttttttttgaaggaaaggaagattttagtttttggttagataagatttatgtaatttaaaggaattaagtggaattatgaaaatatataaatagttttgtagttggagggatgaaaatttttattatataattagaaaataaaatggtaataaaaatgatttattggtttttaagaaagaaataaatagtttatatataaaaggacgagaattagattggaattaaattttttatttgaaatattagaagttagaaaataatgagagggaaaaaaggttgttaatttaatatatggggaagtagtgtgttggtaggaaaggtagtgtaagagaggaggtttgtatagggagatggaagagataatggagagaagataatttgagtagaagttgtgaggagtagatagatagtagggaatgggaatgttaacgatggcgttattttaaaattaattttgtgtggtatgttttaaaattattatttttatatttttattgtattgtaaaaattttggattaatattttgtttattttttggtgtagaattgtgttaaaggatacggattttatattattggaagaagtttaaggtttttgttttaggaggatatggatagttgtagggatgttaattgggttatgtttattagtaggtggggatattgtattttagaaatttaagggagttgtcgtttttttttttttttttgttttttggtaggtttggatttgaggggttaggattttttgagggtggtaatatagttatttttatttttcgtatttttttttttatgtgtttagaatatgatgtaatttgagatgtagttttggatgtttgagaagtaaagaagtatggttggagtaggagttaaagtttgtttttgtttgagaattgaggagtttagttttttatatgtttttataggtaagagattggtattataaaattatatgtttaaaataaattttattgttgttattttagtgtaagttattatttttttttatattgaatatttcgttattatttgtagtatttttgatattttagtaagaatgatattttattttataattattattttaaatttattgggatattagtatatagtttgaagattaaataatagagatgtattttaatgaaaataagagttttttatgttattttttttttttattgttattatttttagtttaatgattttaatagtaatatgcgtatgtttttgtatgtgggggtattaatttagatatttattgattttttgttatgaaattagataatttaaattattaaaaattaggtttttgatattttttttgtgattttattattttattatgtttagtttttttgtaggtaatttttgtattttttatttatttatttatttatttatttatttatttatttatttatttttgagatagagtttcgttttgttttttaggttggagtgtagtggcgcgattggtttattgtaagtttcgtttttcgggtttacgttatttttatgttttagttttttgagtagttgggattataggcgttcgttattatgttcggttaatttttttttttgtatttttagtagagatggggttttatcgtgttagttaggatggtttcgatttcgtgatttcgtgattcgttcgttttggttttttaaagtgttgggattataggcgtgagttatcgcgttcggttaatttttgtatttttaaatatagtattttattattttgttagttatatttaagattttttgagttttttttttgtagatgaagttattgttaattttatttttttttgttttatttttttttttattttatattttaatttttggtatttataatttatttttaatatttttaaattcgatagtatttatggtttgtttgtaattaggtattttttaaatacgtatgtgtatattattgagaatatattttttttgttgggtattttttaatttttatgaaggttttatttgtaatttttttttttttatatatgtagtttattttttaattatatttttagatgttttgaatattttaataatattgtaaaatttatgggattatatttattatgtttatttattttttggtgtttttagttttttagttttaatttaaaagaaatgatttttaggattgttgagtagatgttattttgggattttttttattgttttttttggtagaagataatgttttaggtatttgatattttttttttatttgttttgattatttaattttgttacgatatatcgtttgttaatatttaaaaaaggatattttggaagtaaatttttttaatttttgtatgtttgagaataatttttattttagattcgtgtttgaatgaaattttatgggtttataagtatgggtttagttaggagagagaggaaattatatagtaatgtaaaatgagaaagattaatataaagaaatacgaattttaataagagatttgagtaataagagattggttagaaagaagtaaagagaattttaaataatatagtagtggtagatataatagtgtataatataatataatataaaatggttatttttttagtgtattagttagggttatttagagggatagaattaatatgatagatgtatgtataaaggggagtttattaaagcgtgttgatttatatgattataaggtgaagttttatagtagatcgtttgtaatttgaggagtaaggaagttagtttaagtttttaaattttaaaagtagggaagttgatagtgtagtttttagtttgtggttgaaggttttagagtttttggtaagggagaaaaatgaagggtggaagatcgttagtttagtttttttacggttttttgtttgtttttattttagtggtgttggtagttgattagatggtgtttatttagattgagggtgggttttgttttttttagtttattgatttaaatgttaattttttttggtaatatttttatagatatatttaggaataatattttgtattttttaatttaattaagttgatattcgatattaatttattatttaggttaagatagagtatttaagaaggagttttttttagttttttttttaagggtgaggttagattttgttagggaggtatttttatggtttattgaatggtagagaggtagttgttgaattgttgttttagcggtagtttgttgtaatttattttttgggatttgttagaaattttttttttagggtgttgggaaagttgtttttgtaaggtttatggaagtggggtggtggtggttattttttgttgtaaaattgttaaggggggtgtgtatgtttgacgaagttgttgggtgttgttggttgttttatattgtaaaagttgggtgttgaggaagtcgtaagagtttgatgttgtagaagttaggtgagaatttgttaaaattaatgatagataacgaattatcgattataaatttcggagaatattaagtaggattaaaaaaataaaaataatttatatttaagtatattatatttaaattttaaaaagttgaaatatataaatattgtttagaaaagtaaagaagggtgagaaaagtataagttattatattttatgtattttttaaaaatggatataataggtagatatttgttgatatgtattataaaagttggataatatagttatgaaatatatttagatattttaaatatatatattaaataagggaagaaataaagtattatttaaattaataagaaagagttaaataatttaatagtaatgttggaaagtaggtgaatcggtaatttatagaagaatttaaatggtaaatagcgtatgtaaagatggttaattttttttataatatttgatatagaaatattatgttattttagtttaaatataattatatatttataaaaattggggagtatatttttgaagggttattaataaattgtttagaaatattgttttaaaagttgatgtggttttggaggattaaatgtgaatatttaaaggtatttttatttgttgagtaaaatattaagtggagaaattgaagatttttgattgcgaaaggatttaagtgtttagagtagaattgaaattttgaataatggttttttttatgtagtaggtagagaatgtgattagtggaaaatagaggtttatgtaaataaaagtagtttagatttggatataaaatttattaattaatgtatttatttatttgttaaataattatttagtttttattaagtgttatgtattattttagataaaatagttagtaaggtaaaaatgtttttatttttatgagttttaattttagtaggaaagaaaaaataattatataatatatagatatgtagtattaggtggtgatttttgttatgaagatataaatgaagaaagttgagaaataagggtttattagtagtaaatttttatgtaaatagtggtaggttaattttaaaattagaaatattttattatagttttttttgggttattagtgttagatataagaaaagtgtagtagatttattattatagatttttgtatttgtatttatttggaatgaaatgtattgttaaagaacgaagtagatggattgggtttatattttgtttttttgtagtagagaatattgagtttgatgtgtagattagtagattttttgtgtattatttgtattatttttttattttttttataagtttatattaggagtaattatgtttatgtattgtaatgtgaatttattttttggtaatattttagtggtgtatagtaagtaattgattggtttaggaaaagaagttttagggtaaaggagagatgaattgagaatattttggtagggattatttggtattatgtgaatttgaaagtagagatatataaaataatgaagatgataggtagagaaaattagagataagaaatatatagaggattttttgtataatatatagtgtattatttttagattaatttttttatatattttttttggtttttgtgagttagttttttgttatgataataaattttatttttttgattaatttaatttaggtatttgtgttttttatgatgatatgtttttacgatggttttgatttatttaatatatagaggaagattatgagtgtggattttcgaaatgtagttagtggatttaattattgtttgttgagtttatgagtagatgtgattaataaagatttgtgtatatggggattgaagggttttttttgtttttggatagagttggtgaagaaattaaatgaaagtatacgatattttatggttaagaattttaaataataaagtgtttatatgagatgtttgggttttaatatgggaagtatgtatatgggatgtgtgggttttaatttgtttaaattgtgtttattattaatatttgtgggtatatagtaagtgtatatatgtattaggtatatgagatgttttgaaaaaaaggatgtaatgtgaaattagtaaattatgaagaatgggtatttatatttttaagtatttatttattgagttgtaaataatttagttatatttttgaagttattttaaatgtatagttattatttattatagttattttgttgtgttattaaatagtagattttgtttattttttttaatttttttttattaattatttttatatttttttttttttgattttttagtatttttttaatttttggtaattatttttttattttttatgtttataaatttaattattttaattgttagattttataaataattaagaatatgcgatatttgtttttttgtgtttagtttattttatttatggaattgttatgtttgttgttgtaaatgattggattttatttttttttatggttgaatagtattttattatatatatgtattatattttttttatttatttaattgttgatggatattttgatatattgattttttttttttttttagtgtatatttagtagtgggattgttggattatatgagagtttaatttttagttttttgaagaatttttaaattgttttttatagtagttgtattaatttacgtttttattaatagtgtttaagtgttttttattttatattttttttagtatttgttattgtttgttttttcgatattagttatttttaattggagtgagatgatattttattgtagttttgatttgtatttttttgatgattaatgatgttgagtatttttttatatgtttgtttgttatttgtatgttttattttgagaaatatttatttaaattttttgtttaatttttgattggattattagtttttttttatagagttgtttgaatttttatatattttggttatttattttttattagatgggtagtttggagatatttttttttattttgtgggttgtttttttattttgttgattgtattttttgtgtttagaagttttttaatttgatgtaattttatttttttattggtgttttggttgtttgtgtttgtagagtattatttaggaaatttttgtttagattaatgttttggagattttttttaatgttttcgtgtagtagttttatggtttgaggttttagatttaagtttttaatttattttgatttgatttttgtatatgatgagagaaacgagtttagttttatttttttgtatatgaatatttagtttttttagtattattttttgtagagattgttttttttttagtgtatgtttttggtatttttgtttaaaatgagtgtattgtaggtttgtggatttgtttttgggttttttagtttattttattggtttatacgtttgtttttatgttagtattatgttgttttggttattatagttttgtagtataatttgaagttagtaatgtgatttttttagttttattttttttgtttaggatggttttagttattttgagttttgtggttttatataattttaagatttttttttatttttgtgagaaatgttattggttgtttgatagtgattgtgttgaatttgtagattgttttgggtagtatggatattttaatattattgatttttttaagttatgaatatggaatatgttttttttttttattataaaaaaattttttgtattatagagattttttatttttaattttttttattatagaattataatagaatatagaatttattataaaaaatttttttattatagagattttttattttttaattttttttattatagagattttttatttttttggttaagttaatttttaggtattttattttgtgtgtggttattttaaatagaattattttttaaattttttttttatattgtttattattggtatatagaaattttattgattttatgtgttgattttttattttggaattttattgaatttattagttttaatagtatttttgtggagtttttaagtttttataaatataggagtatattttttgtaaataaggataatttgattttttttttttaaatttggatgttatttatattttttttttgtttaattgttttagttaggatttttagtattatgttgaataatagtggtgatagtggtatttttgttatgttttagattttagaaaaaagattttagtttttttttatttagtatgatattagttgtgggtttgttatatatggtttttattatgttgaagtatgttttttatatttttagtttttgagaatttttaatatgaaatgatgttaaattttattaaatgttttttttagtattaattaaaatgaatattttatttttatttttattgtgttgatgtgatgtattacgttaatttgtgtatgttgaattatttttgtattttagcgataaattttatttgattgttatgagtgatttttttgatgtattgtttaatttagtttattaatattttgttgaggatttttgtattaatatttattagagatattggtttataggttttttttatgtgtttttgtttggttttggtattaaggtaatattgggtttatagaatgagtttagaagtatttttttataaaatatttgtagaagtattttttttttttttattttttggaataatttgagtaggattggtattagtttttttttgaatgtttggtagtatttagtagtgaagttattaggttttggaatttatttattggtagattgtttattgtgattttgattttgttatttgttattgatttttttaggtttggagttattttttgttttaattttggtaggttgtatgtgtttaggattttgtttattttttttaggttttttaatttatagtatatagttgtttatagtagttattaatgattttttgaatttttgtagtattagttgtaatgtttttttttttatttatgattttatttatttggatttttttttttttttttttagtttgttttgttaaaggtttgttaattttgtttaattttttataaaagtaaatttttgttttatagattttttgtattttttttaattttatttatttttattttgatttttatttttttttttttttaattaatttttgttttggtttttttttgtttttttagtttttaagatgtattattagattgttaatttaaagtttttttttttttgatgtaggtatttatagttataaattttttttttattattgtttttgttgtattttatgggttttggtatgttgtgtttttattgttatttgttttaataaatgttttaattttttttttaatttttttattgatttattggttatttaggagtatattgtttaatttttatgtatttttatagttttttaaatttttttttttattaatttttagttttatttaattgggtttagagaagatgtttgagtaatttgagaggttaaggtgggaggattgtttgagtttaggagtatgaaattagtttaggtaatatagggagatttagaagtagtttaaatgggattgaaaattatgtatttgttgtttggattgtagagggcgttgtaagtttggtggaggtgagtaaagggagagattagataaagttgagtatttaatttttagagttgtatatattattgagattaatagttttatatatagattttatttaatatttgtatttttaaagttaattataatagatttgttagatcgttttagaattataattaagaatagaagaaaataagattatttttattgtattttagaattttgggtgatagttgatattgggagggttttaaagttataaatgtagatataaataaaaatataaatagatttagaggttttagattatagtgaatgtgttaatttgtaattttttttaaatttaatatatggtaaataattttattttgttattaaatatttttttaagatattgttttgaaggattgtatataattgtgttatagtttgttatttaattatttaaattttgaggttaggtgtagtggtttatatttgtaattttagtattttgggaggtcgaggagggtagattatttgaggttaggagttcgagattagtttggttatatggtgaaatttcgtttttattaaaaatataaaaattagttaagtatggtggtaggtgtttgtaattttagttattcgggaggttgaggaaggagaatcgtttgaatttaagaggcggaggttgtagtgagtcgagatcgagttattgtattttagtttgggggataaaagtaagattttgttttaaaaaaaaaaattttttttttttttgagtatagatgggaattgattgaaagtatttttattgaattgttggtttttaattttttttttatttttatattttggttttattttttaattataaaatggaaagttttttttttggatatatgagtatataaaaaaggagaatttttatattatggtgtgtttagtttttttttatattttattttgtttttattttatagaggtaatatttttatagttttatgtagatttttttattttagtttgtaaaaaagaataatgagaatatttggatataggaaggggaatattatatatatgggggtttgttgtggggaggggggaggagggagggatagtattaggagatatatttaatgtaaatgatgagttaatgggtgtagtatattaatatggtatatgtatatatatgtaataaatttgtacgttgtgtatatgtattttagaatttaaagtataataaaatatatatattaaaaaaataataaataaataaataagttagttattgtatttggataattattttgtttaaaaaaaaaaataaaaaagtaaatttaaagaaaatttgtaataagaatagtattttgtatttatatatttttttttttgaaattgtatttattagaattttttatttttaagtattttagtgtgtattttttaagaaaaggatatatttttgtatataattagaatatagttattaattttattaaatttaattttaataatttaaattgtttgaatttttattgttatatgaattttgtttgaaaatataagtttaaaattatatttttatttttgaatatgttatgttttttaaattatttatgtttttatgttgtatggtaaatttttgtaattaaaatattgtatttttttgtggaatttattttttataattttatatttttatcggtagtttgaatggtaatttattttatatttttttattttttttatttttttttgttattatatattttatttgtgttttttagtagtttggattgttagagataagtgattttgttttattatatgttttttattggttggagagatatatatttattattattagttattttttttaattagagtttttgtaaagtttttttattattattttttttttttaattataattttgtttagtaattttttttatatttagatagtttttttttttttgtaagaattaagcgtatgtaagtttttttatttgttatttagtttatttttttttatatgtgaggattttggatattattaagatgtttttattattgattggattttggaaaaatatgttttgtttttttataaaatatatttttttttaagtttttagagtaaattttgaaacgagttatttatagattagttttttggtattaattagtattgttattttggttgtaaaagataattgtttaaattatttataggttagattatttaggggatatagtttagagtatttatataattttttttttaatagattatttgatttaaaaagaatttattaagttaatgttttgaagaaattgataattttttttagaggtttttttgaaaaaatataagtagtttatattaataggttgggtttagagttatatagtttgagcgaggatatgggatgttgagttgagtttagagataggttatatgtagcgaattagaataatgttttaaaatttgtaaatggttgaatttgggtattttttgtgtgaaggggatgttagaaatgagtaattaaaattttaatagagattgaaaacgtattttaaagtaggaggtaaaatatatttattttttaggtagtatatttaggtttgatatacgttagaatgggttttagatatgtgataataggataaaaaagttagtaaaattatgggaaagattaaagtgaaaaatattataatataaagtttatatattttattaattttagtaattgtaaatagattaaatttgtgattagaagatagagattgataaattgaatgtaaaaatataaatttaggttatattgtttataagatatatatttaaagtataaaagttattttagagattaagtgtaaaatatagaaaggatatattatgtaaaaattaattttaagaaatggtgtttatttattaatgttaaaaataaattttaaggaaaaagatatcgtaggatagaaagattgatataatgataaatatttatttagttaaggaaaataaaggttgggtataggggtttatatttgtaattttagtattttgggaggttgaggtaggtggatcgtttgagtttatgattttaagattagtttaggtaatatggttaaaatttgtttttgtaaaaaataaaaattagttgggtatggtggcgcgtgtttgtaattttagttatttggaaggtagaggtgggaggatggtttgagtttaggaggtgtaggttgtagtgagtcgagattgtattattgtattttagtttgggcgatagagttagattttgtttaaaaaaagaaagaaaagaaaaggaaaatatagtaattataaatataggtgtatttaataaaatatttttaaagatatgaattaaaattgatatattatttaggtagaaagtaataaatttattatttatagtatgatattttaatatatgtttttggttttttataagttaagaaggtaaaagtaggatataaaagatttaaataatataattagtaagtttgatttaatagatttgaatatattataaagttattgtttatgtttttatttatgtgaattggtagatttattagtatttattatattaattttaattttaattttaattttttttgaaatagagttttgtttaatagtttaggttgaaatgtagtggtgcgattttagtttattgtaatttttattttttaggtttaagcgatttttttgttttagttttttgagtagttgggattaaggtgtatattattatattttggtaattttgtatttttttagtagagatagggttttattatgttggttaggttggttttaaatttttgattttaggtgatttatttgttttgttttttaaagtgttgggattatagttgtgagttatcgcgtttagttagtttattatttttaatgttttttaatgtaatgtaatgtaattaatataataggtattggtgaataggtattggtgaatttattatttggtatatagatgagaatatagataataattttataatatatttgagtttattaggttaagtttattaattgtgttgtttagattttttatattttatttttgtttttttgatttataaagaatttagaaatatatattaaaatattatattataaatggtagatttattgttttttatttaaatattatattaattttgatttatgtttttgaggatattttattagatgtatttatatttatagttgttatggattttagttatacgtggaaatgaattttgttaataggtagtgagtttggaagaggattttaaatttagatgagaattataatgtttttgtgatttgagttttgtgatattttaagtagaaagtttaggtgagttttgtttagatttttgatttagaaagttgatgtaataaatgggttttgttttaagtttttgtatttgtattaattttttgtgatagtggttagaaaattaatataatatattttgtttatttaaggtttacgtattgtattataagtatttttttttaatatagcgtaatgtttaaaaattgatatatattttatatattaatttttgattttttatttaagttgtggttgtatttatgatgatttaaaaatatagtttaataatatttttttatatggttttttttttttgttttatttaaattattttaatattttttaataaaataaatattaatatgtatttttttttgtattttgagtttttttttgatttatatttaaatttttaatttaatttaatattatttttgtatgtgtgtatgtatgagttttttttatttttttattaaataattaatagatttaatattatttttagtaaattttttttattttattgaataaaaagtttatttttattatgtattatatttttaaaaatttatttaatataaatttaggataatttgttttgtttttgaaagtagttttaatgtggtattttttaataagtaagagtaaattttttagtgtattatttaaaatattttaaattattattgtaattttttgaaaaatattgaattagaattgtgtttttaatattaaggaaaatgatttaaaatttttttaaaataatttttttttttaaaaattttatttgagaatgtttttatttattagaatttttttattattacgttgtttttttttttattttatataggtgttatgttgtttaagtatattgtaaaaatttgttttttaattttttatattttacggatttttaatttttattagttatagttttttattttataaatttggattgattttaaaagagtgaaatgggtttttttgtgttttaaagaaatgaagaatataaattataatattggaagttttttcgaaatatgtttatgttttattttaaaatttttttaaaagtttagtaatttttagaaataaaatacggtagttttattttatttatggttttattttttatagttttagttatttgtggttaattatagtttgaaaataggggtgtatagtatagtaagatattttgagaaagagaggggattttatttatttaagttttattatcgtatattgttaaaattgttttattttattattagtttttgtttatttatgattgtgaataatttataaattatattttattataggtttgtatgtgtatgaaaatatagtacgtatagggtttggtataattcgtggttttaggtatttattgtgggattttgtagtgtattttttatgaataaggggggattattataaatataatttcgatttcgttaattataatataaatttggatcggtttttgtgtagttaatgttgttttatagttgatttttttttttagtggtagtagaaatatgttttaattgtttagttttataattatttgtaagtatttattagagtaatatttttttatttttattaatagttatttttatatttattatttttgaaaaaaattagaaatattttgttaataaaattattttattgatatttagattaaagtattataaagtttatgtattttgtttggaaaattgatataaattgttttgtttaagaatgtggtatttttatttattaaatttttttttagtaaattttttttatttttttttgtggattgtatatatgattagtagacgttttgatattttttatgtttattgtttttttaagtgatttttttttttttgtaatagatttattggtttagttagttagagataaatgatgttgttttatttttttttattggttggtaaggaaagtatttagtggtttaatttaagtataatttttgtgaattttttttttttttttttttttttaaagtagtatttcgtattgggttatattttggtttagtaattatttttttggggtaagataattttttttatttgtaagagttaggtatgtgattaaaaaaattttttttgtggttatttagttattattttttttgttttgagtgtttggttgttagttttatgtatatattttttattaaagttgttttttataatttgttatagtaagttttgatttatagaatattttaggtttatttataatataataattttttataaatgtaaagaatataagtttgtatagttttaaatattagtaaaatagtatggagtagagtgttcgtatttaattttaaaaaaggtagtatttttataggtgtttttaggataataaaaattgatttgattgatatagatttatgggataatatgtgagaattaggttttgttttaaaggataggagaaaggcgggtagggagtatttaatatggtttgaattttagatatataatttagttgtttaatttggttttatttattagtttgaatattttcgtgagattttgttttatatttttggtaatattaaaataaaaaatgaggattattttaagtaagtttagtttaggagaaattattaaaattgttatattttttgtttaattttttttataattattattttttttttttatattaattagaataggttagattgttataataattagatttgaaagtgtatgaaggttgaaatacggtagaattttataatttattaatgtaatagtaggaagatattgatgatttgtgagtagttttttttaagttggtgatttagggatttaagttgttatattttaatatggtgttttttatttttttttttgtgaaaattaatatattttaatttttttttaaatagggaggttaggaaaagtggttaattgtgatttagaagattaaggtaagacggttagtgaaatttataatagtgtttattacgttgttattatggttgtaattaatatttattttttttcgttataagtcgtttttgattttttttattttttgaatttagtatagtttgtttttttgtttgagtgatagagataattattttagaaaggtttatatagttatttattttgtttttgttggattgattgttttagtgtttattgatggttattattatgtataaaagtattaaaagatatcgttgtattttttttaatttgtttttgaggtatttttcgtaataatggttattaattgtagtttttttttaatgaagggaaaagtaatatgtatgggtttaataattaggattatagttagtagggattatttttttaatagtattgttgagttttattttgttagtagtagaggataatattgaatttattatatggttttattatttgaggagattagttagcgagttggtgttaggttgattgtattaaaattttttattttggaggggaagtgatttattttttttggaattagtatatattttggatatggatttgttatttttatttatattgtttttaaaattattgttatttaaatatttatgggatgttatgtttaatattgtttaagattataaaatttatttagtaataagacgtagtaatgggataatgatatatatttattatttagatgtagttagtttaaaagaataattgaatggtgttggttggaagatattgttttttaggatgttgtttttgattgtttgtgttgttataataaaatattatagattggataaattataaagattagaattttatttttttatagttttggaggttggaaagtttaagattaaggtattggtatttagtaagggttattttgtagtgtttttatatggcggaaagtgaattatatggtggaaggtggaggggtaagggagtattttttttaattttgagtttttttataagggttttaattatatttttgaggtttatgtttttatgatttaattattttttaaaatgattatattgaggataataaggttaggttttaatatacgaattttggaattttgagttatgtggtttgttgaattgttttttttttattttatttgatatttttaaatttaattttttatttagatagagttgttttagagagtgaaattttggtaggaataaacggatataggttagataagagttataaaagtgttttttagtataaataagttttttgtgagaggggcgtttggttataggttagatatttaggtattagattattttttagaataaagaagtattttatgaagatatattgtaaattttatatttaaattttttaaagttttagtagagtaaaattagtttatagttgtttttatgagagagattttaagattaaattagatgaaaatttagtagatattaaaataattatattttattaaggagaagataaataagagtataaatttttttgggattgtagtatttattattaaattagaataattatttagtttttaaatttgttgaagtttggttttaaatgtattgttttaattgtatgatggattgtggttggtatgtttaaatttaagagtttatgaattttataatttttagtattatatggataatttaagttatatggttatttagtgtgttaaatgtttattaggaagaaatgtatatttggttgtagttttagaatatatgagtttatgtaaaattattgttagagaagttttttagtggttataatttggaatatgtaatatgaatgaagtgattaagagtttgatttgtgatttatattttagattatgatataataattggtgtagttagtattttgtatattttagataatttttttgagttttaggggattgatttataatggagttgaggttttttttgttttttgttattgatttgtaagtaataaatttgttttatataatttgtgtgtgggtatgttttattttattagatttagataataggtaattagtgtgtggtggatttaaatagtagtttaggatgtagtggaaagaagtatttggatttttttttttagtggttggtatagtagtgatttttgttattttttatatagtgggggtttttttttggggttggtaattagtaaatttgttttataaattatgattaatatattaaaattttttatgaaaaagtagataatatgttagattagataggtaatttcggtagagatagaaaatttgagaaagagtaaaattgaaataaaataaaaatatattaatagaaattaaaaatatatttgttaaatttattagtaaatttgatatagttttgggaagtattaatgaatttgaaatagattaataaaaattatttagagtgaaatataaagagaaataaatagtaaaagtaaatttaaaaaataggttaagtgtggtaattttaatagtttgggaggttagggttggaggattgtttgagtttaggagtttgagattagtttgggtaatatggggagatattatttttataaaaaatataaaaattaattgagtgtggtggtatagatttgtagttttagttattcgagaggatgaggtgggaggattatttaagtttaggaggttaaggttgtagtgagttatgattgtattattgtattttagtttgggtaatagagtgagattttgtttaaaaataaataaataagtgtttaatattttttaggtaaaaatatagtattatttgatatggtattatagttcgtggatgttttgttttgtttttattttttattttttttttttttttgtattttatttcggataatttttattaggtattttattgaattggttttttttttaaataaatatattattttggttgattttattttttaatgttgtattttgaaattattatagatttagaggaagttattaagatagtatagaaagattttttatattttttatttagttttttttaattgttatattttatataattaaagtataatattaaaattaggaaattattttgatatatattgttaaacgatttttaataagggtgtaaaggttattaattgaggaaaggatagtttttttaataatgatgttgggaaaattgaagtttatatataaaagaatgaaattggatttttattttagatcgtagataatatgaatttaaaatgaattaaaaatttaaatgtaaaatttaaaattattaaattattagaaaaaaatataaaggaaaatttttatgatatttgattaggttatgattttttggatataatattaaagatatagataagaaaagaaaaaatagatgaattggattttattaaaatttaaaatttttaatttaggaaaggaaaaataaatatcgtatgtttttatttataagtgggagttaggttatgggtatataaaggtatgtagagtggtaaaatggatattggagatttagaagaggggaggatgggatgggggtgaaggataaaaaattatatattgagtataatttatgttatttgggtgataggtgtattaaaattttaggttttataattatataatttatttatgtaataaaaagttatttgtattttagaaattattgatataaaaatatatttaaaatatttaaaaataattattattatttattatgtgtttaatattatttttgatgttttatatttgttattttatttaatttttagtattattttatggaatagatatttttattttgtagttgaaggaattaatatttagagagattaatttggatttatgagtaatgtttatattgtaaagtagaggtaaggagattagttaggatgtttttgtagtaatttatttgggtggaattgttggtttttgaaaatagaaagttaattttttggaaaggttttataatgttattgtttttgttttaaatggtatattatagaaattaattaatttagttgaatggtaattatatgtatataatatgtttttattatttttttatattatgttttgaattttttttttaataaatgtgatataaaaattttaaaagttttgtgtacgaaaggatagtgttaatagagtaaatatggtaattaatagaatgaaagaagatgttgataaatagtatattttataagagattaatatttaaaatatggttaggtatggtgttttatatttgtaattttagttatttggtaggttaaggtaggagtattatttagatttaggagtttaagattagtttaggtaagtaggtaagaaagaaagatattgttttttaaaaaaaatttaggatttgtaaagaaattttaaaatttaataataaaaaaataagggagaggttaagaatgttgattagaagtagttttggtttgtggtttttattgaggagaatggaaatagcgaatgaatattgtattttttgttgaggtatttaggtttttttattggtattgattaggtagttggtataatttatagagagtgaagaaaagtagagtggagtaatagtttatttaggagttataaggggtaaggggaatttttattttaagttaagggagatggtgaatgattatgttattttattagggaaattatgttttttttatgtatttgtataagttgatttgtatttttgattaggagatgtttttgtgagtttatgttattagagttttgggttttaagtatagaattgtgtatatttttaatggttgttgggattgtggttagtggtagtatgttggggattgattaaaataattgagtttttagggggaggggtggttgtcgttgttgtggttttagttggttattttttcgttttattgttggggagattgaatggtttggattggtaggaattttttatagtgtagtatagtagttgtggtagatcgtggttagattgtttttgtaggtgggattcggatttattttttttcgtttggtggggtttttttgtaggaattttagtaattttagttaggggtttatggatagaattttgtttataaattgtggaaattgtggttgtttattttttagagggaggggtggttataatttttatagtttagaaaatttttttttttttgtttgttggttttgaagagtttggtaatttagaggagggggattttttttagtacggtgtatttgttttattaatgggtagttagagtgtttttttaagtagatttttgattttatgattttatgttttttgattaggtgagattttttaataggggttgttggatagtttatataggatagttttgattagtattaggttagtgttttgggatggagttgttagaggaaggagtaggtagttatttttgttgttttgtagtttttattggtgatatttttaggtgtaggagggatttaggtgagttggatttggagtggattttcggtaagttatagttattttgtagaagagggttttaatttttaaaagaaaaataattagaaagtaataatgataataataataataatagtaaaagattttataaaatttttaattaaaggttagtatttttaaagattgaaggtagataaatttatgaagatgcgaaaaagttaataataaatgttgaaaatataaaaatttatagcgtttttttttttttaaatgattataatatttttttagtaatggtatagaattgggttgaggttgagatggatgatttgatagaggtagattttagaaggtgggtaataataaattttattgagtaaaaggagtatgttttaatttaatgtaaagaagttaagagttatgataagatattataggagttgttaattagttaattagaataattagtttagagaggaatataaataggttgatggagttgaaaaatataatataagaattttgtaatttatttataagtattagtagttaaatagattaagtagtagaaagaattttagaatttaaagattattttattaaaataagataggtagataatattatagaaaaaaagaatgaaaaggaatgaataaaatttttaagaattatgagattatgtaaaagagattgaagttatgattgattggggtgtttgaaagagacggggaaaattatttaagttgagaaatatattttaggatgttattagtaagataggttaatatttaaatttaggaaatttagagaaattaagtaagatattttatgagaagattaattttaagatatataattattagattttttaaggtcgaaatgaaggaaaaaatgttaagggtagttagagtgaaaggttaggttatttttaaagggaagatcgtaagagtaatagtagattttttagtagatattttataagttagaggagattggtggttaatatttaatatttttaaagaaaataatttttaatttagaattttatatttggttaaattaagttttataagcgaaggagaaatataattttttttagttaagtaaatgttgagggaatttgttattattagatttattttgtaagagtttttgaaggaagtattggatgtggaaaggaaaaattattattagttattataaaaatatattaaagtatatagattaatgatattatgaagtaattatataaataagtttgtaaaataattagttagtattatgatgataggattaaatttatatataataatattaattttaaatataaataggttaaatgttttaattaaaagatatagaatgataagttggataaagagttaagatttattagtgtgttgtatgtaagagatttattttatgtgcgaagatacgtatatatttaaaataaaggaatggaggaaaatttattaagtaaatggatagtagaaaaaaaagtaggggttgtaattttagttattgataaaatagattttaaattaataaagattataaaagataaagaagagtattatataatggtaaagggtttaatttaataagaagagttaattaatttagatatatattcgttaatataagagtatttagatttatgaaataaatttttagagatttatagagatatttagatttttatataataatagtgggagattttaatattttattattaatattagatagattattgagataggaaattaataaagatatttataggtgggaattgaataatgagaatatatggatataggaaggggaatattatatatcggggattgttgtggggtgggggggagaggggagggatagtattaggagatatatttaatgttaaatgacgagttaatgggtgtagtatattaatatggtatatgtatatatatataataaatttgtatattgtgtatatgtattttaaaatttaaagtataataataataaaattaaaaaaaaataaagatatttaggatttgaatttagtattggattaagtggatttgagagatatttatagaatttttcgtttaaaaaaacggaatatatattttttttggtgttatatggtatttattttaaaattgtttatatatttggaagtaaaatattttttagtaaatgtaaaagaatcgaaattataataaatagttttttaaattatagtgaaattaaattagaatttaggattaagaaatttattttaaattatataattatatggaaattgaataatttatttttgtatgatttttgggtaaataatgaaattaatgtagaaattaggaagttttttgaaattaatgagaagaaagagataatgtattagaatttttgggatgtagttaaagtagtgttaagtgggaaatttatagtattaaatgtatatattaaaaagttagaaagattttaagtcgatatcgtaatattataattggaagaattatagaattaagaataaataaattttaaagttagtagaagataagaaataattaaaattagattggaattgaagaagatagagatattaaaaaattttttaaaaaattaacgaatttagaatttggttttttgaaaatattaataatatagatagattgttagttagattaataaagaataatagagagaaaaattaaatagatataataaaaaatgataaaggggatattattattgattttatggaagtataaataattattagagaatattataaatatttttatgtatataaattaaaaaaatttaaaagaaatttttagatatatatatttttttaagattgaattaggaagttgaattttttaatagacgaataacgagttttggaattgaggtataataaatagtttattaataaaaataaaagtttaggattagatagatttatagttgaattttattagaggtataaagaagagttggtattattttttttgaagttattttaaataattgaaaaggaggaatttttttttaatttattttatgaggttagtattattttgataataaaatttgatatagatataataaaaaaagaaaattttaggttaatatttttgatggatattaataaaaaaaaatttttaataaaataatggtaagtcgaatttattagtatattaaaaagtttatttattacgattaagttggttttattattaggatgttaggttgttttaatatatgtaaattaataaatataatttattaaataaatagaattaaagataaaaattatatgattgttttaatagatataggaaaggtttttaataaaatttaatatttttttatgttaaaaatttttaataaattaggtattgaaggaatatattttataataataagagttatttatgataagtttatagataatattatattgaatgggtaaaagttaaaagtattttttttaaatatatgtataaaataataatgtttatttttattatttttatttaatatggtattggaatttttggttaggataattaggtaagaaaaagaaataaagtatatttaaataggaagagaagaagttaaattgtttttttttatagatgatatgattttagattttagaaaattttattgttttagtttaaaattttttaagtttataaggaattttagtagttttaggatgtaaaattaatgtgtagaaattataagtatttttatacgttaataatagataagtagagagttaaattatgaatgaatttttatttataattgttataaagagtaaatgtttaggaatatagttaataaggaaagggaaaattttttttaaagagatttataaattattgtttaaggaaattagagaggatataaataaatggataaatattttatgtttatgaatataaaaaattaatattatgaaaatggttatattgtttaaagtaatttgtggatttaatgttattttcgttaaattattattgatattttttatagaattagaagaaaattatttaaaaatttatacggaattaaaagtttattagttaagataattattttaagtaaaaagaataaagttggagatattatgttatttgattttaaattatattataaggttaaagtaattaaaatagtatggtattggtataaaaatagattagtggaatagaatatagaatttagaaataagattatatatttataattaattgatttttaaaaaatttgataaaaataagtaatggggaaaggattttttatttaataaatggtgttgggagaattggttagttatatgtataaagttgaaattggattttttttttatattttatataaaaattaatttaagatggattaaagatttaaatgtaaaatttaaaattataaagattttagaagaaaatttaggtaatattatttaggatatagatatgggtaaagattttatgataagaatattaaaagtaattgtaataaaagtaaatgttgataaatgggatttaattaaattgaagagtttttttatagtaaaataaattattattagagtgagtagataatttatagaatgtgagaaaaattttgtaatttatttattttataaaggtttaatatttagagtttataaggaatttaaataaatttgtaagaaaaaaagaatattaaaaagtgggtaaaggatattaatagatatttttaaaagaagatatttatgtagtatttaaatatatgaaaaaagtttaatattattgattattagagaaatgtaaattaaaattataatgagatattattttatgttagttagtatggtgattattaaaaatttaagaaattatagatgttgttaaggttttagagaaaaaagaaatatttttatattgttggcgggaatgtaaattagtttaattattgtggaagatagtgtggtaattttttatagatttagaattagaaatattatttgatttaattattttattattgagtgtattagttcgtttttatgttgttgataaagatatattcgagattgggaagaaaaagaggtgttattggatttatagttttatatgattggggaggttttagaattatggcgggaggcgaaaggtattttttatatggtagtggtaggagaaaatgaggaagaagtaaaagtagaaatttttgataaatttattagatttcgtgcgatttatttattattataagaatagtaagggaaagattggtttttatgatttagttattttttattgggttttttttataatacgtgggatttttgggagatataatttaagttgagatttgggtggggatatagataaattatattgttttttttttgggttattttaaattttatttttttatattttaaaattaattatgtttttttaatagttttttaaagttttaatttattttagtattaatttaaaagtttatagtttaaagttttatttgagataaggtaagttttttttatttatgagtttgtaaaattaaaagtaagttagttattttttagatataatggaggtataggtattgggtaaatatagttattttaaataggagaaattggttagaataaaggggttataaggtatatataagtttgaaatttagtagggtagttaaatttttttattttattattttatttatttttatttttatttatttattttttgagatagaatttcgttttgtcgtttaggttggagtgtagtggcgttatttttgtttattgtaagttttgttttttgggtttacgttatttttttgttttagttttttaagtagttaggattgtaggtgtttgttattatgtttggttaatttttttgtatttttagtagagatagggttttattgtgttagttaggatggttttaattttttgatttcgtggttcgtttattttggttttttaaagtgttgggattataggtatgagttattatatttagttgtagttaattttaaagttttaaaatgattttttttgattttaggttttatatttagattacgttaatataggaggtgtgtttttatggttttgggtagttttgtttttgtggttgtgtagggtatagttttttttttgattgtttttaagggttggttttgagtgtttgtggtttttttaggtttatagtgtaagttgttagtggatttattattttggggtttggaggatggtggttttttttttatagttcgattaggtagtgttttagtagggattttatttgggggttatgattttatattttttttttatattgttttattagaggttttttatgaggtttttgtttttgaagtaaatttttgtttgggtatttgggcgtttttttatattttttgaaatttaggtggaggtttttaaattttaatttttgatttttgtgtattcgtaggtttaatattatatggaggttgttaaggtttggggtttttattttttgaagttatagtttgagttgtatattggttttttttagttatggttggaggagttggaatatagggtattaagtttttaggttgtatatagtaaggggacgttgggtttggtttataaaattattttttttttttgggtttttggtttcgtgatgggaggggttgttgtgaaggtttttgatatggtttggagatatttttttatggttttggggattaatattaggttttttgttatttatgtagatttttgtagttggtttgaattttttttaaaaaatgggttttttttttttattgtattattagattgtagtttttttgaattgttatgttttgttttttttttaaaacggaatgtttttaatagtatttaagttattttttgaatgttttgttgtttagaaattttttttgttagatattttaaattattttttttaagtttaaagttttacgaatttttagggtaagggtaaaatgtttttagtttgtttgttgaaatatagtaagagttatttttgttttagtttttaataagttttttatttttatttgagattattttggtttggattttattgtttatattattattagtatttttgttaaagttatttaataaatttttaggaggttttaaatttttttatatttttttgttttttttggagttttttaaattgttttaatttttgtttgttatttagtttaaagttgtttttatatttttaggtatttttttaataatattttatttttggaattaatttattatatgagttcgtttttatattgttgataaagatatattggagattgggaagaataagaggtttaattggatttatagttttatatgattggggaggttttagaattattgtgggaggtgaaaggtattttttatatggttgcggtaagagaaaatgaggaagaagtaaaagtagaaatttttgataaatttattagatattgtgaggtttatttattattatgagaatagtatgggaaagattggtttttatgatcgaattatttttttttgggttttttttataatatgtgggaattttgggagatataatttaagttgagatttgggtggggatatagttaaattatattattgggtatatatttaaaggaatataaattattttattataaagatatatgtatgtgtatgtttattgaagtattatttataatattaaaggtatggaattaatttaaatgtttattagtgataggttggataaagaaaatatggtttatatatattatggaatattatgtagttataaaaaggaatgagattatgttttttgtagggatatggatggagttggaagttattgtttttagtaaaataatgaaggaatagaaaattaaatattgtatgtttttattaataattgggagttgaataatgagaatatatggatatagggaggggaataatatatattggggtttgtgaggggtaggggtagggatagtattaggataaatagtttatgtatgttgggtttaatatttaggtgatgggttgatagttgtagtaaatcgttatgttatacgtttatttatgtaataaatttgtatgttttatatatgtacgttagaatataaaataaaataaaataaaataaataatttaatttaaaaatgggattttttagattttttatataagtaagattatgtattatttgtttttttatgtttggtttattttatttagtttaatgttttttaggtttatgtatgttgttaaaaataatagtgtgaaagaaaaatagaattttgggattttaaatttattatgttaagggaaagttaattttgaggattgaggtattaatattgttttttttttgtttttaaatagataacggtaattttataatttcgtgttataatttcgttttttttattttttttttttttttaagtttttttaattttatgtaaaatgtagatttattgagtataagataatttataattaatttttttttttattttttttttataggtaaaatgtagatttatttaagttaattaaagatttaggaatgtaattatttgtattatggtttattttttttttttttttttttttttttttttttgtttgtttttttttttttaaatattgaagtttttaaaattttttttggtaaaagtatggattatagatgtttttgtgttttgtgttttttttaggtgtattttttaattttggtaaaataaatttttaattgattgagatttattttagttattttttgatttataataggatttttttttttttaaagtttgaataggatttaattgtgtatatatattatattttttttatttttttatttattgaatgatataggttgattttatattttgattattgtgaataatgttgtaaggaatataggagtataggtatatttttaatatgttaattttaaatattttgtttatattttgtaaatgggattattatattatatgatagttttatttttaattttttgaggaatttttatattgttttttataatggttgtattaatttgtatttttattaatagtgtataaatgtttttttttgtttatatttttaatatttgttattttttatttttttgataatagttattttgattgatgtgaggtgatatgttattgtggtttaaatggaatattttaagtttttttatttgatgatataagagtattttttttaaaatattattgttgatgttgttgttttgtatgaattatggttttgagttgagtttttggatatatgagtttttgagtatttggatatggatttaagtatttaagaattatatatatttttatgtggttgaatattagggtttttttttattggtaagaatttatagaaaaaggagatattataaagattttatagagaaatatttaagttttttttgggaatgaaggagtatggtgattattaatttagaggttgggggaagagttgtttttggaaatattttaggtattattagggaattagaagtagagataggtagaggtgtgttggaaagagtgatatgtgtaggttagttttgggaggtttaattattagtggtttaattgaggtaatgcgtggatgaggagattgataggaaaaaggaatttgaaaagatagattaggaaataaagttttattgtatagtatatttatagtaggtagtttgggtttttgttttagtttttttcggtttttaagggttatttttatagagtatgaggagtcgtgggattggtgaggtttgggtttttgtgttaagattatttacgttttttatttgtttttaaatgttttaaatgttttgtattatttgattttttatttttttgttaaagttttttttatatttttatttttttacgttttattattttttaattttgatatgatttttattttggagttttattatggttatttgtttgtgggaggtattgtttgaatatagtttttgaatgttattgatttggttttttttttagattttttagattgagattttaaagagataattttgtgttaagagaaaggatttagtttatatgtgttatgaaaaatttttatatatagttggttatttagaagttgatataagagaaatatgtaagaagttttataaagatttttaaaaatttaaggataattgtttgataaattttaattaaaggaaaataatattttgggggtagtatttttagttatattattattggtattaaggaagttatagaattttttagaatatatagtgatttttgatttttgaagtaaatgtagggtagggttttggatggtttttttggtgatagggtggtttttatgtttatatttaattttattgattaagtatagattttaagagatgttgattagagaagatgattttttttttgatttttataaagaaggagtttataatttttttttttaatttgaaggaagagaggatgttttttgaattgagtttgtttattgtaattttgatcgtttttattaatggtagtggttttttagtttatttatttatatggggtaaatgttttaattgttttgtttttatagaggttgggtaggcgatttaggtgagatattcggaataaggatgtttgatttagttttttttttttttggtttttttttgtttgaatgttttgaataatgtagtagggatagggttagggtagttaattgtatagaaggttgggttaggtagatataattggtagaagtttaaagtaaaatttttttagtgaggttttagttaattagaaaaaggttttaaagtgatatttgttgttagttgaaaagtttgtgcgaagaggtttgtgagattgaggaatttttaggtttggcgtagtagttgttttagaataaatttgtgggaagttttttttttagataggaaggaaaggatggattagaggtttttattttgagggatattgaggtgggggttgaggaaggatattgagggtagttttaggtttttttgtttatttttttttgttttaattttattttaggtgtgagtatggttttttttttatgtgtttattatagtagtggagattatttttaggttgggtttattttgattttgagtaaattattgttgttggacgtttagtggtaatttttttagttttaggtgttttagaattatgttgtgaataatatagaatattggagtggtttaacgtttttatgtgttattattgtaaattttttgttgttgttttttttttgtttttttttatttggtaaatttatattttgattttagattgtattttttattttaaaagtagaatttaaaattttgggaaaagaaagagagaaagggagagaagaagagaggtggagatatttattgttttggttggggttagaagtaatgtttgttaggtattgttttaattgttttataattattagtattgtttttagttattgttaagaggagtttgataagttatgtttatttataaaaatatattgatgtagatatgtttatgaggaattgttaaataaaaaatatatagaattgaaaaaaattatattgatatttttgttatttgggatttgatgtttagggttggtatagtataatttgtgattttaaatattttttttattattaatattatttaggatttaggaaatgtttttttatagtttttgttttttttttttaaatttagatatgattatatttgaatattgtaaaggtttgtgtattgtgtttttgttgatattagatgtatttattttatggtttagagaggatttaaatagttgaagaatttagaaaaggaatgttaatttaattaattttttaaatatttttattcgaagagtataaatataatatatttttgcgtaatgaagaattatttattagtagggatgggtgttaattttttttggtttgtttttttgttttatatattaatttgatagttatatataatagttgaggatttttttgtaatattaaataagttatattaattttaaatttgtatatgtgaagatttagatgtaaaatgtatgaaatatgatttatattttataaagagaagtttggggtaaaaataaatttagtaatttgttgatttttataaagtatattagtggtggaattgtaatttattattatttttttttaagaattttgttttttttattaaaatttaaggttttttagggtgtgtttaagataatagtagtaaaaatgtttatgatagtaatttttttttttttgaaatatgatttttatttaatttgttttattgaaagaattttaagtataagaataattggtttttaattaatattataaagatgtttattgttgaatcgtatttttttttggttttttaaaattttttaggtatttaatttttagtttttttataattgagaggaaatttttattttaaatgtttatttagtgtaattgaaagacgttatagtgttaggtattggatttagaatttttataaaaaaaaaatttgtttagagatagttgaggttttttagttttagtgttgattggtttttttttaagggattatttaattttattacgtatggaaatatttatagatttttattttttttgttaggtatattagatttattaggttcgagttgtgttgattattattttttttttcgttttaattatgttttggaaaaaggttttgcggattttcggaggttttcgggtagtaattgtgattttgatgttgtcgatgttgagtattttagtggttgagggtagagattttttcggtaagtgtagggtagttgttttttagagtcgttattttgggaataggttttttttgggttggggtacggggatggtgatttttataatttcggatataattttttattaatattttttttgttttgggaaagagagttatgttgtatttttatttattttttaatgatgaagtgaggataatttaattttattttataggtttaagtttggaagaggaggagagaggagagaaaagaggagataaagtgtttatttattattagtgataggataaagtgagtatggggttatttttgaagatatgaatttttttaaagatatagtaggatttgttatttaggcgtgttttaagatttgtttggattaaatattatgattttttgtattgggaaatgtaaggtagtaatggtgtttgtagttttcgtatttggggaaaagttgtttgtatttttgatttagtggagcgtttgtggaggtaaaattttggtattgagggaagttgattggttgattatagaaagagagtttttaggttttattgatttatgggtaaatggtgatttgagtgggatttagatattcgagttgatgatggattaaatttagtagaaaggaggatgtaaagaagggaaataatatatattgtgaaattatttattttagatatagaataatattttatataaatttttttttattttttttaatattttgtgtgtagatattatgatttttttttatataattatatttgtgatatggatattttgttatataaattgttcgggttggtgattgttatagtttaatgggaatttagtttattaaatttaaaagtttgtgttttttcggtgaataaatgtttttttttaggatttagagatttaggatttttttttttttaatatagacgtgagtgaattttatagggtatttgggagggtaaatttaggtatgggaaggaaggtattttatttagggattaagagaataggcgtatcggaagaggataggtttaatttttggatttgtttcgttatttttttgaattgttaggtttatgtggataattttatttttgaggtatttaggagttttatggaaaatgagattttatgcgagaacgttttgatttttttaagtgtagaggtttatgtaaaattagttcgattgtttttttatttggtttataggtcgagatagggatagggttttttttttttttttgtttgtaggaaggcggattttcgaagatttcgagagggcgggtagggttgggtagagtcgtcgggaggattttaggtttgtagcgcgaggtacgggtcggcgggaatttgtggtcgcgcgggttgttttatagtttcgggtcgggttagggtggcggttgcgggggcggacgggttgggtcgtattgattggtcggtgatttttcgtagaggatttcgtgtattagtttaagggtatgtgttattttattaacgggatagagcgcgtgcgttttgtgagtagaagtatttataatcgagaagagatcgtgcgtttcgatagcgacgtgggggagtttcgggcggtgacgttgttggggttgtttgtcgtcgagtattggaatagttagaaggatattttggagaggaaacgggcggcggtggatagggtgtgtagatataattattagttggagtttcgtacgattttgtagcggcgaggtgagcggcgtcgtttttttgcgaggtttatttttggttttaagtttttgcgttaggaggggcgaagggtcgtggtttttggaatttgagtttcgtttgttttattttagaggataggaggtagcggcgagagtggtgggggtaggtgtatcggaggtgcggggatttagggtagagtagggggataggtagagttggttaggttgtttagtgtcgttttagtttattcgttcgtcggttttgttttttgttttgtatgtttttgtttcgtgttttatgtatttgtttttttttgttttatttttgttaagtagttttttttgtttagaatgttcgttttttttttttgttcgttcgttcgttttattagtattgttttatttagtaaggtttacgtgtatagtttttgtagtaggaagttttaggtttagtttggtggagttagggttgttttataattgcgcgtaggatatttagtaattatagttgtgaaataagatattttaatttttggttttaaattattatttatcgtaattttgtttttttaaatgtttttatttatggtagagatttttgaggtgagggtgttttaattattgtatgtttagtatttgatatattgattggtatgtggtgtgagtttaatgattttttgttaaattaatgaataaatgtatttagttgtttatttatttaggtttaagaaaaaaaaagaggtaaatagagttttaaaaatggattttattaattattttttataattttgtttaatgttttaaagtaaatttttattgatttggattttaatagagtttgtgaatataaaatttgaggaaaaaagtttttgttaaaaataaaaataacgtttgaaagatattgtaaggtagtttaaattttttttttttttttttttttttttttttgagacggatttttattttgtcgtttaggtcggagtgtagtggcgcgatttcggtttattgtaagtttcgtttttcgggtttacgttatttttttgttttagttttttgagtaggtgggattataggcgcgtgttattacgttcggttaatttttttgtatttttagtagaggcggggttttatcgtgttagttaggatggtttggattttttgattttatgattcgttcgtttcggttttttaaagtgttgggattataggtgtgagttatagtgttcggtcggtatttttaattttttagaaaagttgaataaatggtataatgtaaagagtaaaagttttggaataaatagattgaagttattaaattattggataaaaatagtttcgggttgtttttggtttaggtttttttttttttttatgattatttattttaggaataaatattttgaaagttaattttatttatttagtgagtatttatttttagatagttgttttattaaatattatttatgttacgttatttaattttatagttatttgtgtattagagattagtattattattttatatattggtatatgataaatattttattggttatggatggggagatggttattgtaggttaatattggtatatgataaatattttaagtaattagtttataattgtttattaagattttaagttttttaaagtatataatattttttgtgttttttattatatatttatagagtttaagggacgtaaagtttcgttaaagttagttttgattagaagtagtaatgagtttatttttgtgtgttttttatgttaatgggataaaatgatatttttaaggtattgaaaatttatgattaattaatttttagtttgattttagtgttatttatgtaggtttgtaaaatttttagtttatttaatatttttttgtttttttttgatttatattttaatgttagtaaatatttatgtttttgttattttagttttatttttataaaatttattttattatttttttttataaatttatgttttttatttttatttttaatttgtttaagatgaataaattttataaggttatatagttgattgttatttttgttggattttaggaaggagaatttaaagaaaagtttaagtttaagtagaaatcgtgattttttttagatgatggtttatgagtgttatttaattggggtgttatttggtgattttagtaaattttagttatatttatgtgtttatattataggattattaatttagatcgattattgtatagattttagaatattttttatggagaatatatataataatgtttgattttagaagaagaaagtaatttttaatagtaaggggatggagtagggtagatagttgtaattaaatttatttgtgtgataaaaagaaattaaggaaaaaagaaaatgagagaatatattattaaataaagaaagtatatattaaatatttattatagttttatattaagagaataaaggaaatgtaataaagtggtttgaaaggtaaaggatgagatgtgtaaaggggtgtagtatttttattatgagtagtaatttgagaagataaaggaatcgagttacgggtaaatatgatgtttgattagtgttatttgtttttaaggtttgtttaaattttttttaaatattataaatttttgaaataatattttttttgttttttgttgtttgttattaggttgtatattttataaaggtagggattatggtatgttgtttgtttttggatttttagtgattgttatatttatatttgttgaaggaattttaatttaagatttggattttaagtatttttttattttggttttaaggagggattttttttatagtaggtatgttgtgtggttttatattttatttttatatttttttttgtttgttattgtttttagtggagtttatagtgattatttttttatttaggatagaggtttttaattattataatttgttggtttgttcggtgatagatttttatttagtttagattaaagttcggtggtttcggaatgattaggaggagatagttggcgttgtgtttattttttttattaggaatggtgattggattttttagattttggtgatgttggaaatgattttttagcgtggagacgtttatatttgttacgtggagtattttagtttttagagttttattatcgtggagtggcgtaaggggatattgagtttttgttattgtgggttttataagataaaggatagagttttttttgatttatttttttttattttttatttttgatgttattgttgagttgggaattataggagattagagtatttttagttttatggcgagtgtattagaagaattttgattttattatttttttagatgttagggaaattattttatatattgttgttttggattttagttttgattgttttgaggaattgattattagggttggtgattgggattttagggtttaagtttatggatgagtttttgaggagtggagatttgtttttttattttgttatttatttattgtatttaaggatttattggttggttttttttttttttaggggtggtttgaatggagaattaggtttttttgatgtttttattttttgtattttagattggattttagttttttattagggaaattatggggtatggggataaatattgatatttaggttttgttttttaggggtttaatttgaatttgtttagagtaagatgttgagtggtattggaggtttcgtgttggggttgatttttttcgggttgggttttattatttattataggagttagaaaggtgaggaattttaggggaaaaggggaagatggtttgtgatttagattttttgtttagagaggttttgtttttagatgtagttttttttttttgattttgagaggaagaaagttgagttggaagtggaaggagataggataaggttggaggaggtattggaatttgattttattagttgaagggtagttttgttatagagttgattgatagagtttattttagggtatttttattatttattattgttttattggtttttttttaaaaattttttttattaagagggttagagtttcggtttttttgttttttagtgataattttttttattttaggggattttaaattagggtgtttaaggatttgaagaatatgaatgggaagagaatataattttaattaagttatatgtgttatttttttttggggtgagagagtggttgtttatgtaatgagatttttttttgtataatttttttttgtaagattttaagggtttttattagtaggtaatattttagtcgtgatttagtgtggggagggtataggtgtaagagggaagagtatgagttgagtgtatttgatagtagtggtttttgtttatggtatatttgttgttatgaggattaagatttaggggtgaagtttgttagtttttaggaatttttagaggttgttttttagaattaagttttaattttggtggtatttttttgttaaatgtggagttagaattacggtttaaatgttagatattaggatgatgtttattttgtgttatatgatggtggttattgtttgtaggtattttttagtgattgaaagaggttgttagtggtagggatgaggtattatttaattttttaaaaagattgaattttttatatttattagaagagtaatagttgtttttttattttttatatatttgtattaagttgaagttttgtgtttttatgagttgattttatttttgtatagattttgggggaggtgatgataatatattttggattttagttttgtttgtttgaagttgtaggaggtttttgaggggtggggaagatggtaggtttattagcgtattttgtgttgattatttttttttttttttttttagggtttttgtattgatttttgagattattttaattgggattggttattatttttttgtaacgtttgtttgtttttgtttagaatttttagttgtttgtgttagtttgtttttttgagattagagttttatagtggttgttacgtagttattaggttatttttttttatttttattttgaggcggatggttgtgattttattttttgtattgatttatagtttttgtttgtgtacggttagttgtatttatttaggttttaaggggtttttgtttttattttttttttagattgtttaagagaagtatatgaaaattattatttgattttagagtttttttatataattaaatatgattttgagttatttgtattttgaatttttttaattgagtagaggtaggaaattattgtagaatgaaggaatatattttgaggtgatttagttaatttgtgtttagaaggagggttgtattttgaaaagatattgaaagaatttggggtgtaaagttatggtgggtagaggaggtagaaaattaatttagttgttgtattatttatggtttttttatattgatgtttagtgtagtggtttgagaatattttagttttttttttggtttggtgagtgttatataagtaaatatggtggaattgtttgggggtagatatagtgatttttggttattggtgttttaaatattttggtaagttatattaattaagaataatttttatttttaagaaagtataattagtaataaaagtattatttttgattttaaatgatagaaatttaaatatattttgtttatggtgtaaaggaagtttagagttaagttgattttagaagtgattagttttagatatataatgagatttttatttttttttttgttatatttttatttgtgaatttgtttttttttttgtgtttttttgtttttgtatagttttttttgcgtgtttttttgtatttttgtttttgtttttttgttgtgttttttattatattgttgtttttttatttttttaatttatggttattgtttatttgtattttttttattttcgtgtttttttttgtatttatttttttgtattttttttttttattattttatattttattttattttttttttttgttgtgtgtgtgtgtgtgtgtttgtttgtttgtttttgttaatatatgtttttagaatgtttattagagttttaataattttaggaaagattttgattggttaagtttgggtaatatgtatattttttaaatatattgttttgtgtacgggatgttgatagttagtattgtgtttatcgtttttattaggaaggaggattggattttttagatttttgtggttttggaaatgatttttagtgtgtagatgtttatattagttatgtggagtattttagtttttatagtttttttatagtggaggggtataaggggtagtttgttttttgtggagtttataggataaatggtagagttttttttggttttagggttttttattgggggtgtttgtttatagttattttattttttgtttgagttttttttgttatagacgttgtaatttgttgatttttgatgatatttttttttcggttatgagggaggttattatatattgtggtttttttgatgtgggtttagttttgaagttggtttatattttagtttttgagtttcgttatgaagttagagtttgggagtttttgcgaggttatgtaaggttatgattttgaaagtagatattttattttttttttttttttatttatatattgggcgtgaggagtttttggtaggttttttttttttatggatgaggttagagtggagaattaggtttttttgggatttttattttttgtattttaggttgttatgtaggtttttagatagggatattggcgtataaagaggtattaatatttgagattttgttttttagggttatagtttgaattttttttaagtaaaattttgaatggagttaaaagttttgtgtcgattttgtttttttttttagggtgggtattgttatttattatagggattaaaagggagtaatatttttggggaaatggggaaggtatgtgttgggttgtttagcgtgtttttagtttttgtgtgtagtttttggtttttggttttgtaaagggaagaggtagggttagggattgaataagatttaaagtttaggggaatatcgagatttgatttttttagttgaagtataagttttataattggggtgggtgatagattatattttaggatatttttatagtttaatattgttatattgagtatatatgttggaagattttttattaacgagagggttaaaatcgtttttttttttttttattgatagttttatagaaataattatgttttgtatttagattttattggatagtataatttttaatggataattaattaaaataataagtatatcgtttataaataagtttgttaatataaagaattgagttttatttagtatataatttggaggaaagcgtgtgggtgttttagaggataatttattggttttgagtatttgtttttattttagataataatagtataatttttggagatagtgatgtttattagtattttaaagtttttgtatattttttagtttttttcgttgttaggttggggatatttgattaatagtaattaatggaatttgtaagtaggtgtatggtggtgtatgagatgttggaaattttataatttgagttatttgaataacggtggaattaagtttttttattgagttaagttattgagatttattttttattgtgggttaagattttattgtagtataattttgttttttttgattattatgaaatgtttaatttaaggaagaagagagtttttaagttaatagggtgaattaattgagttaatggaagttaagagatgattttttaaaataaattaaaaaaataaaaaaatagaaaattttatttgaataagaaaaagttaaggatgttatattttaaaagaattttgaatttattaattatttttaattgataaattattgtggatttatagggtattgtgtgatttttttgatatatgtgattaaattaggttaattaatatatttattattttattttttggtggtatgaatatttaaaatttttttttgtaatttttaaatatataatatagttggttttttatatttgtgggttttatatttttttatttatttaattgtgggttgaaaatatttagaaaaaaatgaaaattaataatataattataaaaataatttcgatttaaaaataataaagtataataattatttttatagtatttatattatattgggtattttaagtataatttagagatgatttaaagtatataggaggataggtttagtttatatgtaaaaattaagacgtttttaataagggatttgagtatttttagattttggtatatagagagggtattggaataaatttttcgtgggtgtcgagggacgattgtatattattattaatcgtagttattatgttgtataatcgatttttagtatttattttttttgtttaattgaaattttgtattttttttttgaaacggggtttaggtttggttggggtgtagtggtacgattatagtttattgtagtttttatttttcgggtttaatttatttttttattttagtttttggagtagtcgggattattggtatgtgtgattatgtttggttagtttttgtattttttgtaaagatagggttttattatgttgtttagttggttttgaatttttgtgtttaattaatttatttgttttagttttttaaagtggtgggattataggtatgagttattatattttgtttttttttgtattttttgattaatatttttttatttttttttgtttttttttttgttatttttatttttcgatttgttatgattttgatttttttagattttataggtaagtgaggttatgtagtatttgttttttcgtgtttggtttattttatttaatataatgttttttaggtttatttatgttgtaaaaaatgtaaaagattttttttttttataaggttgaatagtattttattgtgtatatggattatagtttttttatatatttatttgttgattgagatttaagttgttaatattttttggttattgtgagtagtgttgcgatgaatatgggagtatagatatttttttgatatattgattttattttttttgtagatgtatttagtagtggaattgttggatgatgtggtagttttatttttattttttaaatagatgatgaattaaaaaaaaaatatttatttgggtggggcgtcgtggtttacgtttgtaattttagtattttggaaggtcgaggtgggcggattattaggttaggagtttaagataaatttagttaatatagtgaaatttcgtttttattaaaaatataaaaattattttcgttcggttagtcgtttcgttcgggagggaggtgggggggttagttttttcgttcggttagtcgtttcgttcgggaggtgaggggcgtttttgttcggttgtttttattgggaagtgaggagtttttttgttcggttagtcgtttcgttcgggagggaggtgggggggggttagtttttttgttcggttagtcgtttcgttcgggaggtgaggggcgtttttgttcggtcgtttttattgggaagtgaggagtttttttgttcggttattatttcgtttgggaggtgtgtttaatagtttattgagaacgggttaggatgataatggcggttttgtggaatagaaaggcgggaaaggtggggaaaagattgagaaatcggatggttgtcgtgtttgtgtagaaagaagtagatatgggagattttttattttgttttgtattaagaaaaatttttttgttttgggattttgttgatttgtgattttatttttaattttgtgttttttgaaatatgtgttgtgtttatttagggttaaatggattaagggcggtgtaagatgtgttttgttaaatagatgtttgaaggtagtatgttcgttaagagttattattaatttttaattttaagtaattagggatataaatattgcggaaggtcgtagggttttttgtttaggaaaattagagatttttgtttatttgtttatttgttgattttttttttattattgttttatgattttgttaaatttttttttgtgagaaatatttaagaattattaataaaaaaataaaaataaataaaaaaaaaaatataaaaaaaaaaaaaaaagaaaaaaaaaagatattagcgaaatttaatatgatataggtttagttgtattttgtatttgtgtttattaaaaaaaaaaataaaataaaataaaaataaaaataaaaaataaaataaaataaaaataaaaatataaaaattagtcgggtatggtggtatttttttgtagttttagttatttgggaggttgaggtgggagaattgttcgaatttaggaggcggaggttgtagtgagtcgagattatattattttattttagtttgggtgatagagcgagattgtaaaataaaattatatatatattttgtttgtttgtttgtttttttttatatgaatatatacgtatttttaggaattagaatatcgtttttgttgtggatgttgttttgttttatttaaatttttttttttgggattgaaggatttatttttttattgttgggaatgttgttggttgatagtttttagttgttagttattttttagaattgttttaggtgatgaaagtagttttattagattttattttattttttaggaagaatttatttataatgattggttagtgttggggtataaatgttttaaattttttttttaaattgagttaaatttgaagggattttatagttttagaattttttgggggttaggttgaagattttttgattgaatgatagtttaattttttaaaattttgttttaatttatgagttattttatataatttttttggtataaatgtaatttaaatgtagtgatttttgtgattttttttttaattatgggtaatgttttttttttgttttttgggagatgaagttattggtattgatatttttttttttttttatattttatgtttttatttgttaaaatgagatataggtattttttttttaatattgttaaagttgattattttgatattttgttgtaataataagtatatttgggttttgttcgtagtttaattttaaaaattgaaaaaaatagtttattattttttaaatattatttatgtattagacgttttttgtttgttaaggaattgttgtaataggatttttttttagtgaggttttgtattaaatttagttttttggattttttatttttttattttttgattaataattttattttattaagtaatatttttagttaatttttaataaaattatgtgtggtaggtataatttttgtttttttatattttttgatttagttttttaatttttttattaaattttttaattgtttatagtattttattattatttttatagattaagaattttaattagaaagattttaaatttgtttgttgttatatgagttttttatattaaatttgtgataatttttatgttattttatttttattttttttttcgtgttgtaagagttttttaaatatttgttttgattgttttaattttgttttttatttattgtatattattttattttattttaagatatattttttcgagttatttttaattttttttaaattatatttggtttttgtgtaatatttttttattttattttgttttttttttttttataaattatttagagtttgtaattatatgtttgtggaattatgtaatatatgtatatttttttttattagagtgtaagttttatgaagataatgaatgtatttttttttatattattttaatgatacgtataataaagtatggtatttattgttataatggtatttaaagattatttttgtagttttgatgaattaaggaatatataaataagtttgggggtttagtatagttaataataaaggaaaaagtattttgtttttttttgttattattagtttttgtatatatattttttagagttgtatttttgagaggtttttatagttttaggtaggatttggatatttaggattttttaattgtgataaaaatgagaaaagtttaaaaattaatataattttaaatagaatgtttttttgtttatgtttatgggatttttttggaatgtattttttaaaaaattttgtattatagaaaattttaatagtgttagagagaagagtgttatgttttaatagttaagttttaataatgattaatttatgggtaattttgtaaatttatttaattaattatatatgtatattgggttattttgaagatatttttagatattatattttatttataattattttattatgaaaatttaaagtataatgattttttagaaatataatagtaatgttattattatattaaaattagttatttttttaatatagtcggtgttaatttttttgattgttttatattaatttggtttatatatttttttagttttttaaaaatgtatagtttttttttttttttttttttttttttttttttttttttttttttttttttgtttgtttttgaattgttgttaaaaaaatggagttatttagtggaagtttttatattttggattttgttggttttatttttgtggtgttattcgttatgggatttgttagttggtttttagaaaataataataatattaattgttaatatttattgattatttattatgtgttagtatagattgtaagtaaaataaaatgtttaattttttaaatttttagtttgtttgtggtaagtataaatttgaaatattttatgtgatttttaaaattttgtaaaatttatttatttatttatttatttttagaggtggggttttgttttgttgtttaggttggagcgagcgcggtggtataattttagtttattgaagttttgaatttttgggttcgttttttttattttagtttttagagtagttgggattataggcgtgttattatgtattaatttatttttatgttgtagagatggggttttgttttgttgtttaggtagttgttgaatttttgtttttaagtaatttttttttattggtttttaaagtgttaagattataggtacgagtttttgtgatttattaattttgtaaattttaaatagtgtgatattaaatattaatgaagttatattttatgtatataatttgaaataatttaaataattgaaataatttttaagtattttatgatttaaaattatgtaggttgatttgtaattttatgtatagtaatgttaataatgattttatatttttagttgataaaaaaatttatttttattttttagaattagttttaattttgttattttaatattatataaatattttttgaatataattttttaataaaatgtaatattattaaatttgttttttatagtattttttgaggattgagtttgagttgggtagtatttgtagatttttgtatgattttagttattttgttatttagtataatttttatattatatatatatatatatatatatatatatatacgtatataaatgtatataattttaaaatgttggatttttgttttatgaattattgaaatttatatgaaatttatttgaaattttattgttaaaaattttttagcgtatttgtgtatttgaatgtgatttttttatattaaaagttttattttatatatttgggattataattggttattttttttttttttttttatttttatttttatttattttttattttattattattatattttaagttttagggtatatgtgtataatgtgtaggtttgttatatatgtatatatgtgttacgttggtgtgttgtatttattaattcgttatttagtattaggtatattttttaatgttatttttttttttttttttaattttataatagttttcggtgtgtgatgtttttttttttgtgtttatgtgtttttattgtttaatttttatttacgagtgagaatatgcggtgtttggttttttgtttttgttatagtttgttgagaatgatggtttttagttttatttatgtttttataaaggatatgaatttattattttttatggttgtatagtattttatggtgtatatgtgttatatttttttaatttagtttattaatagattttattttaaagtagttgttggtttatagaaaaattgagtagaaggtgtagagatattttagaggattttaattttttgggttatggattagtattagttggtggtttgttagaaattgggttatatagtgggcgagttagtattattaattgagtttcgttttttgttagattagtggtggtattagatttttataggagtgcgaattttattgttaattgtgtatgtaagagatttaggttgtatgttttttatgagaatttagttaatgttttttgatttgaggtggaatagttttatagttttatttttaaattatatttatattttaattattatttgtggaaaaattgttttttataaaattggtttttggtgttaaaaaggttggggattgttgttagatatatttggtttttatatatgtgtagttttttttattagtaatattttttattagagtggtatatttgttataatttatgtatttatattggtatattattattatttaaagtttatagtttatattaagttttatttttggtgttgtatattttgtggatttgggtaaatgtataatgatattttttattattgtggtattaaatagagtagttttattgttttaaaaattttttgtgatttgtgatggatatttttatgattattattgatttagattttttgtgtttattgatttttagtttgtattttaaattattttttttttgaaatttttttattttttttttaaagtaaatatgtataaatatttgttgtatatgaaatattttgaataaatatttacgggttataaggagggaatatatttttttttagagagttgaaaattaaagttaaatattataatttttcgttttaagagtttttttagtaatcgattttagttttttttattttggagaaaaaaaatattttttaatgattatatgaaaagaaatttatttatagttttatatttgaattttttaaattattaaggggttgagaaaaataaaagtattttttatataacgtgatttatttttttaaataaattaattataaatataattataatgtttttttgtgtatttatatattatgtgtaaggtattgattatatattaagattatttaaattttattaataattttgtaaggaaattattattatttttatattgtggatgagaaaaataaggttagaaatgttagttattttatttatttataaagtttaaaatattagttttaaagtattgagttttggatttggatttagggttttttgtattaaattatattgtattaattattgtattaatgttttgttttttttttataattaaagtttaaatttattgatgtaggtagtatggatagaaatatttttatagattttatagttgtttagagttatgagattattgttgatttattttttttgtgagagttttttttaggagttggcgaatttaatggaggatatagtatttatagttgttgttatattgttttaattgtgttgttttttttagggttttttttataagttagtgttttttttagttaggagggttaggggaaagggttggggatttttgaagatattggtattgtttttttatcggtatgttttttagaaatattttgtagttatatttattatattgttttttttatgttaggttggtatagggaaagttatatggttatttagtaaagttttattgaggaggtggggtagattgtgtttttattttagggtttttagatatgtttgtagtttttatttttatttttttttttattgttattaattttatgtgaggaatgagtatttgtttttttttagatatttatattattgttttattttaatgtttttttgatttttatttttttttttgtttaaggaaattttatttttttagggtgaggaggggagaggaaggtttttattgttattattttttataaatttaaagttttgagaataattttttattattgatatttttgagatttaaattttttttattttaatttatttttttgttatatttttaaaagttatattgaaattagtatagatttatttttttattttaaaatttttgttataatatttttgagttaaaggtagagggtatttattaattttattgttgttttaattgaggggtgggtggtaatgttaagggtgggaatataaggaagaaagaaatattaatgttagttaagaaattatgttattaggttatattgtagttggttgtttttgtgttattggatatgataaatgatttggtaaatgatgttaaattggtttgaaataagagagttttttaatttttagttacggttttagttagttttggatgaaagatggaaaaatttgatatatattttataaagggaatttgttgtttttatggagattatagatggaggttattgaggaattaggtagttgggtggtttattttaggtaatttttagtaggtaatatttaagaagaaaaaaattaggaagttagggaaataatttaaaggtatttgtgagttttgagtagatatagtaatttaagttttatagaagaggtgagaggagaaatatttggaggagaaaagggatatgataaatggggttagaaaataatgttaggttatgtagtaagtttatttttttgtttttgtagatggcgatgtatttgtaataggatagatatgagatggatgggttttaggtcgtttttatgttattattatgttattttttaatttttttataatttttaattatttatgtttatagttttttttattttttttttttttatattgcggatttagttttaataaattttaattttattttttattttaggatgggatttataagggtttttggtgtttggaagtattaattgaacgtaggtttcggatgatgaagatagtgtttattataatgtttacgaggtttatagataattttagggcgtagattatagtttttgtgagttttgatataggggttggaattttaggttttgtggatatgaagtcgttgaggttagaaagtagagtgtgtttatgtgtatgtgtgtgggatgggatggggtggagggttggttttgtaaagatttaaggtttttagtttagggaggagagtgaagtttattattagaaaattatgaagtggtttttgagtttttatgtttaggttcgtttttattttgtgaagtgtatttttatttttaataaatttttgtttttgttgttttatttttttaaaagaaagaaagaaatttatgaagtgtggaaaataagttttgggatataggagtaaaaggtaggaagttttgaatttgatagataagaaagtattaaaaagtggtggaatttatttttattttagtgttttagaagaggtttgtttaggttttagtgttttattttgtagttataattttttttagtagaagggaggagggtgaggtaattgattttgaagaaggaatgattatttttggagaggaagttggttttagaaatattttttgtgattgagtgtttattgtttagttatgtgatgttgattataggaggaaagatgttgtttataagatagatgaggatgttgggttgatttagtgttacgggagatttggaaaatattgtgattttaggaatttttgtggtgaggaaatagtattgatgtgaagtgtgaatagttttgttatgagtttttgtattatattttggaagagtttttttattagtattttattatttgatagttaaagaggttttatttattttttgtttgggagtaacgatatattgttttcgttttatttttgtgtttttttttttgtgggtatgtttaataaagtaggaggttgatgagattttttcgagaaggatttaatgaatggataatggaaagatttttgtattatatgggaatatgtgattttagagatgggagatgataaaattttagtaattgttatgagaagatttggggattttttggaaataaaataatgaaatttggtatgaagggataaattagtaaagaggggtagaattgttgatatatattattggtagtagcggtagagttggagcgtttaattagattgtttaagttatgttttaggatagcgatgtttgttagtgtaaattgcgggttaaatttaaattgtttgagaataggtaaatattagatagttttttttttttttaggtttacgtagaattgtttatttttattaaatttatgggtgtattggttagagggatcgtaagattggtataagtttatattataagaggcgacgtggttagttgatgagtgaagatgataagtaggaaggtggagaataggggaagaaagaattttaatatataaaatgatgaaagaaattgatttttaaatattacgggttttatttttggtatagtttgtggatatttttaatttttgttttttttatttttattgttggtagttgttcggttaaaattgcgtttttttttttattataatgtgcgttatataagggtagaatattatatgtttagtttttattattttttgagtgtttggtatattacggatttatgattaaataatgtaattgaataaaagaaggaatgaatgagttattatggtatttagtttttttagttagagattaggtttatttttttttgttttttaagatttattttttatttaatttttttattagttaataataaattgattgtattttttttttttttaggattggtttagaataggatattttatatagaggtttttttttttttaaaaaaaagaaaagtatgtaggattttattaatttaaaataatgtttgttaataattgtagggtataaggaagagtataataagaatggtaataatattataaaatatataataaataaataatgttttttttaaggtttttgttttgttaatagtaatggtttttagaggagagtaattgattttttttgaaatgaagagtggaagttttattagtttttggatttttgttatttttttttattttttttttttttttgaaggaggttattaaatgtttatagtgttttgatttaatatttatatttatttgaggatttaggtaaattaaatttttttttttttaatgggtagtgtgtttgtttgaggatgttagagtagaatggtagtcgtgtaatgtggttttagttaaatgagtcgaattggatatttttgttaagacgtgtaagttttttatcgttgtatttttttttttttttttattttttgagtatttataagtgttagatatagtaggggatgtgtaaaatattaattaggtatggtttattattaaggaataaattgaagagtggaagagttaggtaggtaagggagtagatataatgtattgtagtatgttttgtgaggaggttattaatagttttatagtttaatattttttataagtatttgttaagtaaattaaattatattatttttttatgttttttggtttttttagtggtttgttgtttttttttttgaaatgaaattattttttaggattttttggagaaattttaaaatttatttttgaggtttttgtttaagttaataattttgtagttaagtttttttatcgatatgtttttgattacgttatgatttttagtttttttattttaatatttggttgtttgtttgttttttttttagtttatttttttttttatttagtatgattgttttggattgttttaataggttattaataaagttttatttttgtaataaattttgattttttattaaatataaagtaatttttttttttatttgggatttgttttgggtgtcgagttttgttggaggatgttattttgttggtttagttggaattaagttatttgtatagttttagtttttgttgagtttattgttttggttagtaatggttttttgtttttttgtattttatatcgttttcgttattagtttgagtattttttgtagggaagatagtatgattttttatttttgaatttttaaaatttagtttattgtgtgtttaaacgtgttttgaattatagttgttatatttgaggacgatatagattttggggaagatggataggtatattagtagaattataagaaggttaggattagttatgattagggttgtattttgatatgtgagttttgagtatttttgtttttgtgggtttttttttttatgaaaatatggaaaattgtattttatgattgaattggtataaagataatataatttaggttgaattaaaatatttttttaggttttgaaattttatttttttttaattttaaaaggagttaaaatatttttatgtggttttatagtatggagggttttttgtattgtttatgttgtgtttaatggatgagtcgagtttgattagggtattttggtgtgaggttgaagaaaggaaatttggaataaagaagttaagtgttttggagaaggaggtgaaatttttatcgtcgaataaaattagaatgggagtagttatggttaataaggttgtggaagtttagattttttagtttattttattttttaattatttgattttttaatttttgttttataaattttattgtttatataaagaagtagggagttagagatggattttgaaagggaagagggagaaaggaatgtatgaagagaggtggaaatagatggatgataaagatagagaagattaagagagattaaatgattaataattaatttgtgtttttttttttttttttttttttttttttttttttttttttttttttttttttttttttttttttttttttttttttttttttttttttttttttttttttttttttttttttttttttttttttttttttttttttttttttttttttttttttttttttttttttttttttttttttttttttttttttttttttttttttttgagatagagtttttttttgttgttttggttggagtgtagtggtgttattatggtttattgtagttttcgttttttggatttaagtagtttttttattgtagttttttgagtagttggtattataggtatgtattattatatttggttaatttttattttttgtagagatgaggttttgttatgttgtttaggttggttttaatttttgggtttaaaggatttttttgtttcggttttttaaagtgttgggattataggtatgagttattatgtttggtttatttttttttttataggattttattagatgagttgaagaataggtaatttgggttgataatttgagaataaaatgatttaatttattaagtttttttattataaatttttaattttaaaataaaaggatattttattttgtaaaagaaaagaaatgtgaagttatatttataatagaaatatgtaaaaataaaattgatatttatgtttttattatttataaagtttagttatatgttaattttatttgattatttgtgaggtgatatatatgaggtagttgagagtaaatgaggattatgtggtaaaatgattgttgaaggtatttagtttgttggatttttttatttattttttatttgtgttagtttttacgtggaaatgttagtaagtttgagagaaagaaaagggtattttttttaatatttatagagtatataattgatggaattatttattttaagcgttattataggagatattcgaaaagttttaaaagttgtttagggaaatttgagaatgatattttataaatttttaataataaaaaattatttattgatggaaattttattaatttttgaggtaattatgatggaatgatatagagatttttaggttatagttattgaatataatataaatagaatagtatttttagtgaacgttaatagtatagataataaaaagagtaggttgggattttggttttttgaaggaggaatagttataatttttaaattttttaatattgaagggatttttaggaaatttttataatttttttgtaaatcgtttttttttttttgttttaatttttttttttttagttttagagaatattttttatttatatatttatttataatgtttttatttttataggggtttattacggtggttagggtaagggtttttagtattagagttttgtttaggattattttttttttaaggtagttttagtagttgttgttttgagttgtagagtaattgtgaggatttcgagataaggtaatttgaagatatttaaattaaattttgttaagttaggttttggttaattagaaaaattttttatgatgatattttagttattagttgaagagtttgtattaagagttttggaaggagatagggtaatttttttgttgtgatgtagtttttatttagagtggatttgaggaaatgttttgtgaatagagggaggatacgaaatcggaattttttttggtgtgtgtatgtttgttagtggtaagaggggtgggtattttttttttttttttttttttttttttttttttttttttgagatgtagttttattttgttatttaggttgaggtgtaatggtatggtttcggtttattgtaaattttgattttcgggtttaagtgatttttttgttttatttttttaagtagttgggattataggtatttgttattacgttcggttaatttttgtatttttagtagagatagagttttattatgttggttaggttggtttcgaatttttgaattcgtgatttgtttattttagttttttaaagtgtttagattataggtatgagttatcgttttggttaggggtgggtatttttgagtagtttcgtggatagatgatattattaattatacggtattttttaggattttttgagttataatttttaggaatttttttttgagtcgatttttttttttggtagtttttatttttttttttttttttggtttttgtatgtgggttagttgttttttttttttgtttttatagtgtatatggaattttttaaatgttaagttgattttatttatttagggatttttgttggtggtagtcgattaatatttttgttttttttatttgtataaatttagtttggtaagttatttttaagtttttaaaagatttaggtggttttggttacggtaataaaaaaaggttataatgttagatggtgttgtttatagtaattgtatgagattttatatagtttttttttatattgagtaatttttacgttttgtgttttggtgttttttgtatatgtttaaaggaaatttagggatattgattatatttaaaatttggttggtttaattattttaagaatttttttttttaattaagaatgttaagttaaaagttgagggtagaataagaattgtattgatttagaaaaatggttttttttttttaaattattagattttttaaaatttgttattttattatattaaaattttaaatatttgtaagggattagggattgagttaaagttagttattagaataaaatttattattttttttagatatatttattttttgtatatgatagaaatcgtaagttaatggaagatttatttagaattattttgtttttgataaatggttttttgagatttttaatattgttttattttttattggtagagattgtaaaaaaaaaaaaaaggtgaaataaaaaaaatgttttgatttttgagagttgtttggttgtaattaataaggttttggggttgttaggagttaggttggtatttttaggtggttttggtttttttattgaagataaaggattttatagaatattagaattagataagtattttgtgagtatagtggattttgtgagtatagtggattgagatagaatattagaatgtttagttattatgtttgaatttagataaaatatgaatattgtttaaattataaaaatgattaggtatgtttttttcgggagtgattattgtttttttattattatatttgtagttttaggatagttttttgtttttttaggtaggatttatgaagttatttaattataatattgttattttaattttttattttttgttagaatttaattaaaagtaaaattttttatttttaaattttttttaaaattatttaaaataagtataaattttataattgatttatggttaattttatgtgttagttagattgtgatttttagttattaaattaaatattaataatttaggtgttgttgtgaagatattttgtagatgttattgaaatttataattagttgattttaagaatttattttagaaaaattgggtgagtttaatttaagttgttgaaaagttttaagagtagagttgaggtttttttgaggaaaaagaaattttattttggatagcgtgttagtttgtgttgagagttttagtttgttttttttgataattattatttagtggatttttgatttgtttagtttatttttatagatgtaaaaattaattcgttgtattatttttttaatatatgtatttttttggttttatttattcggttttaataattttttattgtatgatttttatggtgagttttatttattattgtaatgaataataaagttaatttgtttattgtttggatgtttttgttggtttttggttggaggtattgaggtattttattaggtagttgtgaggaatatatatatattgtatttggaatgaaaaatttttggattttttatatatatttgttatattttaatattatttttattttttaaggaggatattaaattttagagagttgaaggattttttttagggttatatagttggtaagtagtatagatgtgatgttatggggtaagttatgagtttttgtgaggagtgatgggtgagagtttttttttgtgcgaatttagaatttagtgttttaatatgattaggagagatatttgattttataggtggttttattttttttagtttttgttattgtgaatgaagagggtttttgaggttttatttgagatgtgttttttttattatttaatattttttttgttgtgtagtaaataatatgtttttatttttttttttgtatttagatttatttgttttgtatttaatggaaattttttaggattttggtaaatgaataaaatgttttgggatggtagtttagaattttatttattaaaattatagtttaaataatttaattttagttaagaagttagggtgttaaatgtaggattagaattgtattttggatgggaagttgagggtgtagttttagattttatattttgtggggtgaagggaaagtttaaggtaaagttattgaagagattatagatgtatttttttttttttttttttttttttttgagatagagttttgttttgtcgtttaggttggagggtagtggcgcgatttcggtttattgtaagtagttgggattataagtatttgttattacgtttggttaattttttgtatttttagtagagatagggttttatcgtgttagttaggatggtttcgattttttgattatatgattcgttcgtttcggttttttaaagtgttggaattataggcgtgaggttacgtttggtttaatagatgatatttttatttttaatttagttttgtttttttttttttttttgttttattcggttataatatagtgaatattgttttagttttttttgtttttaggttataattttaatgtaaggtaaagtaataagtaaatgaaatttagaagaatagtatgttattttaataaaagttaatttgttatttttgtttagtagaaagagaaaaggttttttttataaattaatagtgggaataaaatttggagtttaaaatagtattttgtttaataatttttttagaaagtatttattgatatgttattgattttataattaaaatagtaatgggatgtgttattataatttatattattaagagttttttaagaaattaggtagaatttatgttagttttaataaatagttataacgttttttaagattttgtatatttttaaattattttagtttgattttatgtattggtaaagttttattttgaaggttaagatttttgttttgtagtggttaaaggtgttttataataataatagagtttagagtagtatagtgaaaagaatataggttttgtaataagataaatatgtattttatgttgtttttgattttattagttgtagtattttgagtaagttatttaaaatatttgagttttaaggttattttttataaaatagaaggaaaattattaggtgatagttaatatggtaaaatgaaatgatagataagtgtaattataaagttaaatataatttggtgtttgatatatagtatttatttttaagtggtagttgttatataaagataaatattaataatgataatgataataatattatgttttgggttgggaaagtttgttaatttttttttatttatttaatttttttttcgtagtattttaggtatgtgggagtttgtgagttatagaagtattaagatattgttgaaaaatataatttttttgaaggttgttttatttgttagattttttatgtaataaagtattttaaaatttaatgattttaaataatggtttagtatttttttatgattttgtaagatagtaaattgtgtttaatttatttgagtggtttttatgtattgggtaggtttagttttttttaggtgggtttttttatatttttgtagtattaataggtttggtagatatagggggtttgtttttatttatgtggatttattatttagtaggggggttgaggtttattataggtgttggaaagtttttttgtgtaagatagaaatagtaggtgttttgagttgaatttaaaatttacgatattatttttattatattttattatttaaagtaagttatagtattagtttatattaaaaggtgggttaatagattgtattttttgatagaatgggttataaagaatttgtagttatttttgtaatttattataaatattttttggtttttggtaatatgtaaatgaatttggtgtgcgagtgttggagagtttttatatttgaaataaattttatatatttatttattagttaagattttgtttttattaatttgtattaaaaatatagtgaagtttttttaagggagatttgaattaagaattgttgaattttagtatgaataaggtgttataatttatttttataaaaaattttatggagttttataaatgaaaatatagaattgtgaagaattgtaagtaattttttatgattgttaagtttatattttgatataaagttttgtatgttgatatttagttacgtggttttttataattataaaattaatgaagtagaggaaatttataaaaataattgtttgttatttaatattatttttattaattttttgttagtaataatttttatgtgtatgaattagttgttttaaataatttatttgaataaattgtataataaaaaataataggaggtcgggcgtagtggtttatatttgtaattttagtattttgggaggttaaggtgggtagattacgaggttaggagatcgagattattttggttaatacggtgaaattttatttttattaaaaatataaaaataaaattagttaggtatggtggtagatatttgtagttttagttatttaggaggttgaggtaggagaatggtatgaatttaggagatagagtttgtagtgagtcgaaatcgcgttattgtattttagtttgggtaatagagcgagatttcgttttaaaataataataataaaatgaggaaagattgttttgtaatggttttttattgaaaaatatgtaaaattatttttatgtttagatttattttttttatagtttttgagtattttatagttaaattaaataggttattttatgaagattttgtagatattatggtatgtaattaataattatttgttgatttagattgaaatttttaattatttgaattagtttataaagttgattgtttggagattgatattttttatgtttagtagtgattgattttttttttaggaattttttagttttaatgtgtatattgtaaatattttttgtataggtttttttatttatttatttatttttagagatgtggttttatcgtgttgtttaggttggttttaaatttttaggttttattttagttttttaagtagttgggattataggggtatattattttatttggttatatagatatttttttttagttttaattattaaattaatgataaataatttttaataaaaattttaaaagtaagtgttgtttaaagtaatttatatatttaatgttatttttattaaaaattattattgagattttttatagaattagagagagtttgaatagttaaggtaattttaattaaaaagaataaagttggaggtattatattattcgattttaaagtatattatagggttatagtaattagaataacgtggtattggtataagaatagatatatagattagtggagtagaatagataattagaaataagattttatatttataattatttgatttttaataagtttgataaaaataagtaatggggaaaggattttttatttaataaatggtgttgggagaattggttagttatatgtagaaggttgaaattgtaatttttttttatattatatataaaaattaatttaagatggattaaagatttaaatgtaaaatttaaaattataaaaattttggaagataatttaggtaatattatttaggatatagatatgggtaaagattttatgaggaagatgttaaaagtaattgtaataagggtaaaaattgataaatgggatttaattaaattaaagagtatagtaaaagaaattattagtagagtgaatagataatatatagaatgggagaaaagttttgtaaattatgtatttaataaaggtttaatatttagtatttataagaaatttaaatgtataagaaaaaaatgaataattttataaaaaagtgggtaaagggtatgaatggatattttttaaaagaagatatatatgtagttaataattatatgaaaaatagtttaatattattgattattagagaaatgtaaattaagattataatgagatattattttatattagttagaatggttattattaaaaagttaaaaattaatagatgttgggaggttgtggagaaaaaggaacgtttatatattgttggtaggagtgtaaattagtttaattattatggaagatagtgtggtaatattttaaaatttaaaggtagatatattatttgatttagtaatttaattattggttatatatttaaaggaatgtaaatcgttttattataaagatacgtgtatacgtatgtttattgtagtattatttataatagtaaagatatggaattaatttaaatatttattaatgatagattggataaaaataatttggtaatatatattatggaatattatgtagttataaaaaagaatgagattggatcgggcgtagtggtttacgtttgtaattttagtatttcggaaggttaaggtgggtagattatgaggttaggagattaagattattttggttaatatagtgaaatttcgtttttattaaaaatataaaaaattagttgggtgtggtggttatttgggaggttgaggtaggagaatggcgtgaattttggaggcggagtttgtagggagtagagattgtgttattgttttttagtttgggcgatagagttagattttgttttaaaaaaaaaaaaaaaaaagtaatgagattatgttttttgtagggacgtggatggagttagagattattatttttagtagattaatgtaggaatagaaaattaaatattgtatgtttttatttatgagtgggagtaaaattatgataatatatatatggatatatagaggggaattatatatattgggatttattgaagagtggagggtgggaggagggagaggattaggaaaaattattattggttattaagtttaatatttgggtgatgaaataatttataaaataaatttttatgatatatgtttatttttgtaatagatttgaatatgtatttttgaatttaaaatgaaagtttaaaaatttttaaaatgaggttttttaatttgagaattattaatattttgagttagatgataattatttttttgtgggaggttgttatgtgtgttataggatttttaatagtatttttggtttttatttaatatatgtcggtagtagtttttttattagtgataataaaaattatttttagatattgttaaatgttatttgaggggaaagttgtttttatttaagaattattgttttatgaggtaatagattgtttaaaataaaaatagtagtaatgtattgtgtgtttatagaatatgagaaagaaattatatgataataattgtatagtgaataagagaaatttggagtatgttaatttaaggtagatttgaagatagattatatatatatgtaaaattttagggtaataattaatttaaaagaaagtaaaaaaatgattttagaaataaatattttatcgaattaatagaaatatttagtaaaaataatttaatatattaataaggatgttaaatataattggtttagatagattaattaaatgatagagaagaatagattgaataaaaatggaatattgaattataatatattagtaatttattttaaatataacgatatatttttattaaaagtaaaaagaagggaaatatatattatgtaaaagaaattaaaagaaagttagaatgattatgttaatattagataaagtagaaattggagttcgaaatgttaatagggataaagatagatattatttaatgataaagggttatttttttaaagagatataataattttaaatgtatatgtatttaataatagagttttaaaatataggagataaagttgatataaaaggaaggagaaatagaaaaatttaaaattattattggagattttatatttattttttagtatttatagaaaaattaagtagaaagttaataaggatatagaataattgaatagtgttaataagtaatttgattaagttgtaagttatatttatagaatattttatttaataataggaaaatatataatttgaaattgtattaattttatttattatatttttttttgtgaatattatgtttttttttatttatttatttttttttgttttaaaaaagttttataatattttttttgatgattttttatattttttgttaaatattttttatattattttgtttttgttaatggatattttttttttttttttattattaaatatttttttttatggtttttatggtttagtttgttagagatagataatgttgttttttatagggttttgatttgttgaagaggaaaatatttaatgttttattttggttttatttaaatttagtttttgtaagggtaaattgttattaaaatttgattagaagggagtgaggttgtggagattgggggttggggtgaggaattgtaaataatatatgatatatgggtgtttttttagcgttttttgtttggaaaattaattaattagagaagtgaagggtttaataattaagttaaagaataggtaggttgggtatggtggttgatgtttgtaattttagtattttgggaggttaaggtgggtggattatttgaggttaggagtttaagattagtttgattaatatggtgaaattttatttttattaaaaatataaaatgagttgggtgtggtggtatatgtttgtaattttagttatttgggaggttgaggtaggagtatcgtttgaatttgggaggtggaggttgtagtgagtcgagattatgttattgtattttagattgggtaataagagtgaaattttgttgtaaaaaaaaagaaagaaagaaagaaaagaataagtattattttgtgttttgtgttttgagttattattaagtgatttaatttaaggacggtttatgtttataggtttatagggaaaaagtagtagtattttaatgtgtttgtatttgtgaaaaagtagaggatgttttatttttttagtttgtgtagtttttagtgagttttaggatgtgttagttgaattttatgatttaggtattgtttattaaattgataatgaatttttaaattaattacgagtttggtttattggtatgaatttgatgtttgtagtttaaagtttgttagaaattttgggatgtgtaaattttgggaaaaaattagaattaaagtgaaggaatggattcggttgtttttttagatatgtgagaataggttaattttttggaggtagttaaaataaaattaaaaggataaattatttgttttttttatatttttttttttttttttatttttatttaatataaagaaagttaggtttttttttgtttttgattttgaaattttttttttagatatattggatgtttattagttaggttggtgagaaaatgaagattaattgttatgttattttttagttatgatgatgataataataattgatagtaagatgatagtgtttgatatgtattgagtatttattatatgttagatgtttttttaattgtttttattatatttgtattaattgatttaatttttagaatgatattattaagtaggtgtattattatattttttttttttattttattaattaggaaatggagaagaatagattgaataaaaatggaatattgaattgtaaattattagtaatttattttaaatataaagatatatttttattaaaagtaaaaagaatggaaatatatattatgtaaaggaaattaaaagaaagtcgaaatgagttggatatttgattaaagttatattattagtaagaaatggagttagaatttaaatttaggtagtttaattttagagtgatatattagagagagggtaattgtgttatattgtagtttagaaggggatttatgttacgatttttattatagataagggattatttgttaagttataattttattattttaaagaagtaattgtatgtggatttggttatttatatatttaattgtttttatttagaggtgtttttttagggttagttttgaggtggaaatttgtattaatgtagttgattaagtttttttttgtagatgatttatgggtagaaatgggtttttttttttttttttgttttttatatttgattgtggttttgtatttttaggagattggttttaggaatttagttgatattaaaatttgtggatgtttagttttttttataaaatgttgtaataatttatatttatagatttaaatttatggtaggttgaatttatagatgtggaattttggatagggaaagttgattgtatttgatttatgtatagataaatatttttggttaggtttagtataatttatttataggtgatttaaaaagtgaaggtattttgaagtttttcggttagttgaagaatttgaaattttattgttagatttatttagaaattttatagatttaaatatgttatggttaataaaattttgtagttttattaaaacgtaaagaaatgtttttgagtttagattaggttatatggtattgaagatttagggtttgtttttaattttagaagaggaggattataaatttttagtttgggagggttttataaaaacgttgttttaaaattatagattggagtttttttttgaatttttttttttttagggaaaagagtgtgaatttgcgtagtgtttttttatttttgtttatttgagtattatagggtttatgggttttaagtttaagatattagatttagggaggatttatatttttttttttttgtttatttgtgaggtatggtgaggttattgttttatttttatgaggatagtggataaaaaggaattttttggagggaagggagaggtagagatgggtaaagttatgtaaaaggattgaaaagtagatttgagagtttaattgggaatagaaattttgtggttatgattttaggggattatgaagatttgtagaagaggaaaaaagatattatagggatagtataggtaaagttttatataatgtttatattaaaatgttttatataaatttttttgaatagagattttttaaggttatttattttagatttgtaggttttattaagattgttgggaggagaaaaatgtagtggtttttttattatttaattatagttttttgagtgttattaagattttttttgtttttataaatataaatattatagtatagatgtatttatagaattgtagtattagtttttgtagttttttgttttttatttaatttgtggataattttttatagattagataattttttatattattaaatagttttataaaattttatttttagtggttgtaaaaattttattatatatttgaaagagtatttatttaaatatttttaaaaaaaaatttggggatatttaaggagattaattgaaagattatatgtagaatagttaattttattttttttttattttgatttttgttatataggtggttggtatttattttttaaataaaatatatgaagtttttttttagaagaaattgaatgggtttagagaaaataattttacgttatggtttttatggttttttagtgaaggaattagattttgaaatattagttttaaattttatttgatttttttaaatttatgattattttttagtcgtttttatatgtaaaataatatgaagaaatagaaaatattttaagagcgtaataaggataaataaaaagaaaaatttaaaatagatagattagaaatttaagatagttttaaatatatatataaaatatagttaaataaaattttaattattatttttataaatattgaagaatgtagtttttttgtaaaataaattaaattggtattaattttttttttataggtaaaataataaaaatattttgaaaattaataatatagttataatatttataagatatttttttttaaataatttaaatatatataaataaagataaagtatttgttatgtaagtatatttagttttaagataagttatagtttttatttattatgtagaattttgggtttaagttttttttgtatagattgatgtagaaattattattttagatgtaaaataagatttgtttaaaattagattgtggttgttgaggaggaagtgggaatggggagtgattgtttaatggatataaggttttttttggaggtgatgaaaatgttatggaattatatagaagtgatggttgtataatatgggtgaatgtattaaatgttattgagttgtgtattttaaaatgggttaattttgttatatgaattttattttaataaataaaaagattgtttaatttaggtttatgtttttatataatatgttatataatatattttattattttttaaaaaattaataatataggatagtatatttattttagatttttagaatatttattattttttaaaattttattattttgaataaaaatagttttaaatttatagattatatttttatttaattttatgatttatttatagtttgttttttttttagtaaagtatattttttattttttgttgagtttatgtattttttataaaatttattttttgatattttttattatttttaatgttaatgaagttttttttgttattaattttgggtatgtttttttgatagtttagtttgttagagataaatgatgttgatttttttattttgttttattagataaaaagaaaagtatgtaatgataatattaaggttttatgttaatgtggtttatgtaaagatttatgttattattttttttttttaattataattttattttaataattatattttgtgattaaatagtttttttttttttataagtattatatttattattagttattttgaggtttttaatgtgaattttagatagtgatatattttttggttaatatttgaataatttttatataagatgtgaagaatatgataataaattgtaattaagggtatcgaagaatatagttaaggatttttggttgtgatggtcgtttttagtaagatattattttataggatattttttggagtatgaatttaatatattagaaattatattgtggaggttttttttgaagaaaaaaaagtagttgggaaattcgtgataataaggatttgaaattaatgtggtatgaaagtgagggtaggtgtatagttttgggttagttatatagagttagggttattgttttaatatttgaaagagattgggtttgaatagtgatgattatattaattaggggtttggatttgtattgtttatatttgagtagagattggaatttagttgattgtgaatgagtgtggaagagttttttgttggaggtaaatgattggagttttgtgtatatgttgggttataaggaagagtataagtatattttttggaatagggttttttagggtttgggttaagttagttagcgttttttttttttttattttatttattggtaaatttgataaattagtgttaatttgttttgtatgatagaatttattaaatgtgatggttgatattttgagttagggtggtaaatgtagttattgatttaagagtaatgtgtagtaataatttgggtatgagaataggattgtgaattggtatgtaattttattagtgatagatgtgtattattatttattggtatataggttttagtttagtgttgagaaagatatataaaatattaagatttttatagtaagattggtattataaaatgtttatttttagtttttatggattttttgttttgtagtttattgtatattttttatttttgttgaggtattattaaattaatttgtaaattttgtaattatttttttttagtagattttttatatttaaattttaattaagattaagaattttttttgatatttggatattgaaaggaagtattttttaattgttttttttatttatgtatttttttattagttggggagtttgggggttataagattgaagtagtaggtgaggtttagatattagattaaattgagaattaattaaaatagggatggggtagaagtatttttttataagatatgtttattagtgtgttatgttagtttattattgttatggtaatatttagaggttattatttttttttatggtaataatgatttattggggttattgaagtggtaattggagttattatttataaattaaggggtggattatgtagaaatttttattttatttttagaaatttttgtatagtttattttttaatttgtatataattaaaagtgggtataaatatgattgtagaattgtttttgagttattattttgggtatattgtttatagggtaattttgttttttaaggagtagtttagttttataaaagttgttgtttaatattattgttttatttttggaatttttttcgagtgaagttaagaatattttcgggtgaagttttagttttgaggtttgttggttttgtattaagattatttttgtaatggataaatttatcgttagttattttagtattgagggttttttaatgtgggagtttttattttggggaaaatgaagaatttgattggtttcggggggttggttaagggagatttgttgtagtttatgaagtgattttgtgaaagataatgatattttattttattttgagtatttgatttgaatgttttttttatattaagtttttgtggatttataattaagggtgtaggaattttgtttttgagaattttttttatgatagaattttggttattttttttttttttgtttgttattatgatttatatttttgttaatatttttgtgtatgtttttttgtttaaatatttaatgtttttttagaataaatgtttaagattagaagttttatgtattatatttgtgtttataattttattataattagttgtataaattttaatttttattagaagtgtttaattgtttatattaatgaatttttttgttaataaattattgttagattttattttgtttattttttgagaattaaatgatatttcgtagtgatttgaaatgtgtttatttgattattaataagcgtggaaatttttttatattatgtattgatttgttatgttttttttttataagttagtttttatttttggagtggtattgaattttttattatttttataaatataaaaatgttatatgtatagatagatataagtttataagatttaaattttagtttttatagtttaatttttttatattatatgtattaaaaataattttttttagtttgtgttatatttttaaagtgtattttgattaagtttttaaaaatatgtattaaagtatatttattaaaaattaaaaattttttttgttattttatttttgttaagaaatatttttttattttagtttataaaataattttttaaattttttattttaaaaatttaaaaattattttttttttggttaaatagttagtaatgggattgttggatgatatgatagttttatttttagttttttgagaaatttttatatagttttttataatggttgtattaatttatatttttattaatggtgtataaaagtttttttttatttttttttttattagtaatttttttttttttgtttttttgatagtaggtattttaattgggataaggtgatagtttattgtggtttttgtttatatttgattagtttgaattgaattgatttttgtggatattatgttgtatgaatttaatattgagtttttcgtttggataataaatttttttaggatgatttattgtattattttataagcgaattttaatgttaattttaatataaatatgattttatatatgagtgagttggttttgggtttgttgtttttgttcgtttgtttataggtttatttatgtattagtataatttttttatttatatttaagtttgataataaattgaggattagttgggtaaaattttattaatttgtttttttttatgtataattagtaaagaaattaaattgtttatttgtatgtgtaattaatttataggttagttttaaataattgtttttttataattatttataattagtatagtgattttataatattatgttgggattttaagtagaattgtattggttttgtagattaatttagagaaaaattgtgtttatattttggatattttatttgtgaatatagtatatttttttatttatataggtatttttaatgttttttttttttttttttgatagaattttatattgtttggaggttggagtatagtggtacgatttggatttattgtaatttttaatttttaggttttagtaagttttgtgttttatttatttgagtagttgggattataggtttatattattatgtttagttaatttttgtaattttagtagagataaggttttattatgttggttaggttggttttgaatttttggttttaagtgatttatcgttttggtttttcgaagtgttgggattataggtataagttattatgtttagtttttaatgttttttaatgaagtgttaaattatattaaattatttaaaattattaataattatttgtttttgattaaaaagaattttgattaattttatttagtttagtgtaaaattttgatgtaatagatttttataatttgttagatttatagatagtatatttaattttaattttaatgttgtttaattatttatttatataagatttgtttaatatattgtgtaggttaaaatgttgagatttagagagattattaaaattgtttaaagttagatatttaggatatagtagagtaaaatttaaattaagttttgtttaattttaaagttttggtattttttttttgtaattatttatattacgtgataagttgatttatttatatgtgattgagtttatcgataaacgggcgaggaagtatatatttgtattttgattgaagataatgttagttttggttagataagaattaagaggtagtttttattattagagaattttagtttttaaatttttagatgtaattttttgtgtttgaattaatttttagaaatttgtatttgaaaaagtatatatgagaatgaggtaatataggaagtagtggttatttttgtttgttcgtttgtttgttttttgagatggagttttgttttgttatttaggttggagtgtagtggcgcgatttcggtttattgtaagttttattttttaggtttatgttattattttgttttagtttttcgagtagttgggattgtaggcgttcgttattacgtttggttaattttttgtatgtttagtaaagatagggttttattgtgttagttaggatggttttaattttttgatattatgatttatttatttcggttttttaaagtattgggattatagttgtgagttattacgtttggttagttattgtttttatataatttatttgttagttgtaatttaggattgaagaagagcgagattaggaataaataaatgtgttggaggtaagtgtaatatgaaaatattagagaatgtagggttagtgtagagttgtagagaaacgtttttttgtgttgaatttaatttaatttgtttaaagatataagaaatattttttgaattaaggttattttttaggtatggtgggagatgtagatttgtggaaaataggtttaaatttaaggggtttatggtttaatggaatataaaagaagtatttatttataatgttaagtagtaggtggttttttagaaaaaaaataatgtatatttggagaataatgcgtatttttaagggaaatgttataattaaatatattttgaaaatgtttttggattttaaaaggtagagatgatgaggaagaagtatggtatagatttattaaaatttttttttgaaatatagtttaaattttattttatattttttttttttgttaggttaaatttatggttaagtttttttagtgaatttttattttaattattgtattttttaattttataatttttatttggtttttttttattatattattgtttaaatatttgtgttttttgtttttagatttatattttgaagtttaatttttattttttagtgtgtggtattaagaggtggggtttttgggaggtgattaggttatgagggtagagtttttattaatggaattagtatttttgtaaaagaaggtgagggagtttatttattatttttattgtatgaaaatagaaaaatgatgagtttatgttttttgtagggatatggatgaagttggaaattattatttttagtaaattatcgtaagtataaaaaattaaatatcgtatgttgttatttataggtgggaattgaataatgagaatatatggatataggaaggggaatattatatataggggattgttgtggggtggggtgaggggggagggatagtatttggagatatatttaatgttaaatgacgagttattgggtgtagtatattaatacggtatatgtatatatatgtaattaatttgtatattgtgtatacgtattttaaaatttaaagtataataataaaaaaaaaaaaaaaggaaaatataggtggaaggtattgtttgggaaatagatagtaagtttttgttaaatattgaatttgtttgtttttcgattttggattttttagtttttagaattgagaggaatatatttttgttgtttataaattatttagtttaaggtattttgttatagtagttgaatggattaagataattattatcgttgttgttgtaatgttaaaggtttttgttttagttacgttaaagaattggtgtggcggttgtttgtcgcgagtgatagagatacggattaatagagagaaaaagttgtaggttttattgagtagagtgaaagtataaagtttttatagtgtggaaggggtttcgaacgggtagttattgttggttttgggtaattgttttttaaattttttaaggggggaaatatatgcggtgggaagatgttattagagtgagaaataaaggtagtaaattattttgttttatgttttagattttgaggaaaatcggaattgtaatttaggttttatttattttatgattttgtagaggtatagtaaaagagataggattttattaggattttataaagtatgtttataaggaattggaattgggaagttagataaggtttgttggttatagaaaaacggatagttaatattttttttatttttagttttggggaggggaaagggagagagggagagaaagatatagggaaatttatagtaaaattttcgttgtttatagtttttttggggaagaaaatatatatataaattcgggtgttaggaatattgtaagtatatagttttagtgttatttatttaggattgaagtaagttttgatgtaggaaatgagtgagttttatagttttttgagtttttattcgatttaggaagtttagttgtatttttttttattgttattttttttgatgaaatattgttattatatttttttttatttttttagttatttttttttttaggtttatgaatgtaatggataatgttatgtgttaatttgggttggttgagagatgtttagatagttggtaaaatattgtttttgagtgtgattgtgagggtgtttttagaatattttagtatttgaattagaagattgaataaagaagatattttttattaatatgggtgggtattatttagtttattgaggatttaaatggaataaaaaggtggaggaagggtgaattttttttttttttgagttgggatatttatttttatttttggatattagagttttttttttttttttttttgttatgattgtagtttatgttttggtttttaggtttttggttttagattgggagttgtattattggtttttttgatttttaatttttttgatttttattgaattatattatttgtttttttgggttttttatttgtagatggtatattgtggtattttttggtatttataattgagcgagttaattattatatatatttttttgtttttgtttttttggagaattttgatgaaaatattgaatatatttaaatatatgtatagtagttattttaaatatttttgtgttaaatttgtttttttaagtaattttttttgttttttatttttttggtgtattggttatatttttttgtttttttgcgtagtttataatttttgttgaaaaatgaatattttaggaattatattatagaaattttgggtattatttttatattttgtttgttatttttatttgtttgtttgtttatgtgattaataatgattgtttggattattttaataaagtttgtttttatttttttattttatagtgttaagtttttgatgttattttaaggaggtttagttttgagtatatttagggttattttggaatgatagtggttttgtaggatttttttttatttttttttttatttatttagttattgaagtttattaattattattttttttaataatgttttggggtaaaatttttttataaagtaatcgaataaaatagtgagtttttttatgaaatagtttttgaggttagtgtttgatatttgttttattttgggagggttttttttatttattttattttttagtttttttttgtaaattaattagtttatagtttaagttgtatttgtattagatgtataaattttttaattgttttttattataattttattgtaattgagagtgtttttaggtttaaatttttttatgttttgttttatatgaagttattttttttgggaatatattaggatatttattttattttatatagaatagatataaaatatattttatgtttttaaaatatatttttaatatattgtttttttttttaggtaaattttttaagttagggttttggagttgggtgtaattgtggtaagtttttttcggagtgattttttaattttaggagttgagtattaagtggagggtgtggttagtagtttgttgttttattggtttgttttttttgtagtggagttatttttttatgagttaggtaaagggttattagggttttagtagttttagtatattatatttaaggtagattttttattttataagtgggaattgggtagaagaacggtttttttattttttaattgtatttgtttcggatatagttttagtaataggtagttggggataggatgagggattttgaatttttgttttttttagaaataaagcgttttgatatggagttgtggggagagggaggtttgtgttttgggttgtagtaatttagagtggagtttatgttttattgattttattgagttggtatgtaggagagagggagggtatagttttggtttaaatattatagatttttgttttttttgttaatttttagagatttttttgaatagatgttttattattgttgtttgtttttaagaagttttttagaggttttaattttttaaaaattagttgtattggagagtggattttatagtgattattttataatgaagaaatgatagattaatttgtttttattaattttgtagatttttaatttttttttattgggtaggtgttattagtattataagaaaagtagtgtgttaatttttatttttttaaataaaaaagaatatgatttattgtattttttttttatttggattttggaagtttgtatttgttttaataattagtagtttcgttgaaagatagttgggtattgatattaatgaggtagtgttgtagttaaaatatttttttgtatttgagaatttattcgagaaagtattgattaatttttatttatattgtatgtatatggaggtttttttttggattaagatttaatttataaagtagattttttttatatgaatattgatatttttttttaataatgaaaatggtagattatttggttatttttttttttttttgataggaatttttatattttagggagatttataggatattttaataaattttatttaggtttatagttttttatatgaggtgtgatatatttttttaattattgttttatataaaagataaggagttttaatttttttatttttatttaggaattggtaagtatagaatattaggaagttgtgtattggaagtacggggattatgttaggtttttagtagagtatttatatggagttattaagggggtgataaataattgtagttatgtggttagttttttaggaagtgagttggaaagtttatgagtatataatgatgaaaaattaagttataatgttttttgtttaatttgtgagatttatattttttagttaaagagtaaagattttattttataattttatgttaagtgtaaatggtattattaatgtattggttaattgaattttattaagtataattatttttaaaatggttttaataaataatgtttttgttttgtttttaaggagtatttgaaaaagaatttataaaggattgtttttattagttaatattgtttagttatattggggaattatttttttttaggataattaaaatattttatttttatttttgttgaaattagttttagataattatttttttttttttgtaattatagtttatttttgaataatataggtttgaattgtatgggtttttttatgggttgatttttaaaaataaatatatttgaaattttttggagatatatgatagtttgtaaaaaaaatttatagatgaattatgtagtttagaaatattgaaaatttttttaaagttaggtatgttatgaatttataaaatatatgtagatattagtatgtttttataatttattattataaaatatgtataaatttgttataaaaaattaaaatttatgaaaagttatgtatttatagattatatataatgttatttatagtggagagatatgtaaataaatataaagatatagtattgagttataattgtattgaataattataatatataggatattattgtgataattttatagttattttttgttgttgttgtggtaagttcgagtgttgtaagtatgtgtataaaatgttttttgatgttaattattataaattgtgtattgtagtaaaaagtgattttttatggttttcgtatattttttatgtttagcgttatgttgtaaattttgaataatattatgggatttatataaagtgttattagtgatgttgaagtgtttttaaggagtagagaaaagttttggtattataggaaaaagttgaattttttgatatatattatagagtgaggtttgtagttgcggttttttataattttagatatatggtttgttttgtaaattagtttatgtaaatttatagtatcgataaatatagtatagtattgtaaatttattttattttatttattatttttttaatattttttttttgttagtttattttattataagaatatagtatataataaatataatatataaatatgtatgattagattgtttatgttattggtaaaatttttggttaatagtaggttattggtagtttttagggagttaaaagttatatgaagatttttgattgtgttgggtattggtgtttttaattttcgtattaagttgttgataaaaagagttaaattttgtaaaatatttgaagagatttattttgagttaaatatgagtgattagtggtttttggtatagttttagaagattttgagaatatgtgtttaaggtggttgggttatagtttggttttatatattttagggagatataagatattaattaatatatgtaagatgtatattggtttggtttagaaaggagataatttgaagtaggggtttttaggttataggtggatttaaagattttttggttggtaattgtttgagaatttatttaaagatgtggatttaatagaaagaagtgtttaggttaagataagaggttgtggagattaaggttgttatttattatgtagatgaagtttttaagtagtaggttttagatagattagattgtaaatgttttttattaaatttaaaaaggtgttagattggttaggcgtggtggtttacgtttgtaattttaatattttgggaggtcgaggtagtggattatttgaggttaggagtttaagattagtttggttaataaggtgaaattttatttttattaaaaatataaaattagtcgggtatggtgttgagcgtttgtaattttagttattagggaggttgaggtaggagaattgtttagaatataggaggtagtagaggttgtagtgagtcgagattgagttattgtattttagtttgggtgatagagtgagattttgtcgtaaaaaaaaaaaaaaaaaagaaaagaaaaaaaaaagaaagtgttagatgtttagataatttttttttggattaagggaaagatttggaaaggaaagaagattttttatagaatgtagattttttttataagagatagttttgtagggttattttaaaatatgttaaataaatatattttgtgataaaatattttgattttttttagggtatgttatttgttacgttggtattttattgttataaagagtttggttagttttaaggtttttgttttagtgttaatgagggttagatgtgtttcgattttagagggaggaaggtatagtgatgtaagtttaattttttttttttattgtgatttgaattagtgttttaagattattttaaaatgtttttggttaagtagaagggtttatttagttggttgaagggtttaaattttatttttggtttatagggtgaattgtatttttagttattgaaatgattaatgatagtgaaataaaaatgaaatgttttttagtatttattatggtttaggaatgagttaagtattaatttgagagattatgtaatttaattttttaattttagtgatgaagaaatagatatttaaaagagaaaattatttgattaagatgcgggttgggtgttagaattttgattttatgattatgaatatcgtgtttttatttttattttattatgtaattatatttattaattgagttttaaggagttttgataaagtaaaatatgattttttatgagaggggtattggaattttattttagatattttgttgattttaaataaattaataattttaatttttgggttttgagtttaggtagaacgggattttaatttttataattattttttaaattattataattttttaaaattattttttaaaattattaatttttagtgattttttaaaattgttaatttttagtaatttatttatatatttgttaattttataaatatttattgagtgttgggaattaaatatttagtagttaataaaaataatgattaattgagataatatatttagaagtattattttgttagaataaaataattagtatataataatgtgatttttttttaaattgttttatgataattagtaggtggggttatgggtttttttattatttttatttcgtttattataggtgtttatgtattattagtagagagaatttagcgttatagttatgttttttttttttaaaatttattagggattttttatagaggtatgaaaaatattaggtaatttttttttttttattaatattaaatattaagagttttagtttttattttgttttataattataaaatatggtattttgtttttttatatggagtattttattttttttcgtgaaattatatcgtagttattttttttattatttatgagttattttgttttttttttgttttttttttaagatatgagattagattagatttttttagtagatatatttgttggagataagtgatgttgttttattttttatttttattggttgaagaaatatgtttgtgataggttggggatttttaggaatgttttttttttttgaaatgtttagtgtaagaagttggaatgttttttttaaaaagaagtaagttgaattgagattgatgaggtagattttgggtttgagaattgtttgtgggtattgtttttgaaaagagagatgtattttttttaaaacgatttatttttttttttttattaagtgatattttttagtatgattatgagaatattagtgtttagtaaatttaatttttttattttaattattattttttagttttgtaattatattgggatttttaaaataattttttggttgattttttttttatttgtagttatataagttttgtttttgttgggtggttttattttgtgtatttttttttatttttgaaggaagaatttttatttttattagatagtatttttttttcggtttgtattttttatttttcgttttttttatatatcgttttattatattttttttattttttttattgttttaattaattaaatttgttttttttaatgagtgttattattttatgtatatagagagttttaatttttaatttttaaggtttatgtaggtgtgtaaaatattttattattattattatttttgagacgaagtttcgttgttatttaggttggagtgtagtggcgagatttcggtttattgtaattttcgtttttcgggtttaagtaaattttttgttttagttttttaagtagttgggattataggtgtgtgttattatatttagttaatttttgtatttttagtagagattgggtttcgttatgttggttaggtaggttataaatttttgattttaggtgatttatttgtttttgttttttaaagtgtcgagattatagtcgtgagttattgcgttcggttagtgtgtaaattattttaataatttggtttatgtttgaaaatttataaatttgtgtttttattgtattttataaattaattaattgtagcgtttgttgtagtgtattatagtaagtttatgttggttttgaatttttaggaaataagatttgtagattttatttattttaataatgtataattttgaagaatgatttgtataaatgtagtagtattaattttttaatgtttttttaaaggaataaatgttattttttttaagttagggtgtaatttttatgtttttattattatttttaaaaggggtataaaagattatttttagagttgttataaagattaaatgagataattgaaaaatagttaattagattttggaattattgatttttttttttattattgtttttgtatgtttttataattagtaggtggggagatgatttttaattaatttgttttttttttttttttaattttgtttttattatagattttagttttttattagtgatgagattttagtattaaagtaattttttttttatttagttttgggtagggattttttatttatgtttgaaaaagaataagtattttgatttacgttttatatttattaagtatgttggattttatttgaaaaggggagagtttttggtaatttatatagttattatttgtttttttcgataaattttaggtattatatttttttcgtattatataattaataatttgtttttattttacgtttttatagggtttcgaaattagattaatgttaggattattgaagtagtgttatttgttggagataaatgatgttattttatttagtggttgtataggaagaaaattgataagtaatggagatttttataaagtttttttgtttagaaaattgatttgttttattttaaagtatagagtttgggaattaggatagataattaatttgggggtttgagaatttagtttttggatgttatttttgaaagaagaaaagaggtttaaaaaaattttatattttttttttttatttattagatagtaataatttgtataagtttggaaggatataaggtatttagtaaaattagtattttagttttattgttatttttttagttttgatgttttttttgtatttatatgatatttgttttattaatagatgattttgttgttttatatttgtatattttagtttattatttttttaagaagtgattgtttagtttttaaggttttttataaaaataggttttttttgtgtatttttttttattttatattattttttaatttatatgtttattttagttaatttgggtttttttttaaattaatttattttttgttttattttcgttgttagtattgtttttatttatgtagtttatgatggttcgttttttattgttgtttttcggaattattttttttttttttttgttttaagttttatttttgtaaacgaattatatttttaagttttttttaaatattttagtttgtatgaatatattttttatttgttatttttgaattttgttatttttaaattatatttattttttttttttttttttttttttttttttttttttttttttttttttttttttttttttttttttttttttttttttttttttttttttttttttatttttattttttaaagatagttttattttgttgtttaggttggagtgtaatggcgcgattttagtttataataatttttgttttttaggtttaagcgatttttatgttttagttttttaagtagttgggattttaggcgtgcgttattacgtttggttaattttttgtatttttagtagagatgggattttattatgttgtttagggtggttttgaatttttgagtttaggtaattcgtttgttttggttttttaaagtgttaggattataggtgtgagttattatttttaatttttatttgtatttttattgtaatttataaatgtttatatttatatttaatatattgtttattaatttaataattattaataattattttgaattcggtatttttttaggaattgaggagagaatagtgtagaaagtttttggtgtatggagtgtatgttgtatatgttttttttttttggtatatattgatttttatgagatttttattttggaattttagtttttatcgtattttttgaaatatgggagacgtttaataagtatttgttttttgaatattattagttataattagttatattttgtgttttttatggaagtatgtgtatgttttagttaatcgtttttttaaagaagataatgggtgtttgttattttgtgaagatttttattaatttattttaaagttagaaaggaggtgaaatttgttttaatatatagaaaggaatagtttagtgattaaaaagtttgataagaattggaattatatataagaaatattagtcgaattataggattatttttggagttttcgtttttagtgttttttattttatttttttttttaattttaatttaattataataaatatttattaatatgtgtgtcgatgttttcgatttttttgttttttttttttttgtgatttttaaagtatttaagggtgtatttcgttgttgtttttatttttgtttttttaattataaatattgaagtttttggtgagaggtttttggtacgagtgtgataggtttatggtaggtcgttatgagaagttttttaggtatattttatggtatttgttagttatgtttagtaattttttattgtttttgttttagatatattatatttgtgattattgatgaattttttttttatgattttgagttttggattttattttaaaaatttttttttattttaaggttaggaagatattttttaatatcgttttttagaagttttattgtattgatttttatagatagatatgttttttattggaattaattttgtgtataaagtgagataggtgttaaattttttttttttttttttttttagtaaggatatataattgatttagtagtatttattgataggttgatttttttcgggttattaaattgataattacgaaatagattataaaataggtataaaagagaatatattgtatagtttaatttgtataatgttattaagtatgtttaggaataaatattagattttgaaggcgtattgaaaagtaatgaagggattgttatggaagtttgatggtgagttgttttgatgggaagggagagtaatgtagataggaggaagtaggggagagtttttggtgttggttttatgttgttttttgatttgggtggtgggtttatggatgttggtattgtaatgattgattaagttgtatatttatgttttatatgttttattatatgtgtgttttatgttattatataatgttaaaaatgtaatatatttggttttttaattatattttagtaataaataaatatttatttatttatttgtatttatttgagatagagttttgttttgttgtttaggttggagtgtagtggtgtaattttagttcgttgtaatttttatttttcgggtttaagggattttgttgttttagttttttgagtagttgggattataggtgttcgttattacgtttagttaatttttgtatttttagtagagacggggttttattatattggttaggttggtttcgaatttttgattttgtgatttgtttgttttagttttttaaagtgttgggattataggtgtgaattattatatttagttattattaatatttattaaatattataagtgatggatattattgaatgtgttggggatatagtagttaagtgaaaatatagtgtgatatatatatttattgtagggttatgatgagaattaaatgaaataaagtgtttggaagtagaaaatttagtgtttggtgtaaaataaataataatttattattttattttttttttatttgtttgtgtataaatttatggtaattagagttggtataatagatttttttgatagtttttattttttgtataataagaatagtaggtagatagtagtaggatagttttttatttgtgtttttaatattatttagggataggaatggaaaattaggtattatgtttttattattttaaatgtttagtttttttaatttttattgtatattttgttttattttgtaaatattttttatttgttaattatttatgttttaatttattttataaaggaagttattagttttttttattaatatttaatttagttattttgtttttttgtattttttttttaagattttatataagattttttggttagatgtatttgtcggagataagtgatgttgttttagtttttatttttattggttatagaaaaaaatagtaataattgtttgtgaagggatggggatttttagtaaattttttttttttttttataaaatgttttaattagaaagaaagaattaatatatagatggataggaagattgatttttttgggtgttatttataaaaggaaagaaaatatattttttttaaaagatttttcgttttttttttatttattaaatattaattttaatgtatatttggaaatgtaaaaggagtatggtatttttattatttatttttgttgttattatattgatttttgtgtttaattttttataattaattttggattgtaaaagttttattgtttgatatttttttttgcgtttatttatatttttttaaaagatgtaatatttttgttaaatttttaatgttttttttagaattttagttttgtatatttattttgattttttagtattatttaagggagttttttaattttagtttaatagatttttttttatttttattttcgttttttgattttttttgttttttgtatatacgttatttatgatagtttttgttttttagcgagtttttagttaatttgaaacgtaattttttttttgtgttttgagttttattttttttggaatttatatttatataaatgttttttttttgttgtaaatataagtttttatttaattttaattatttttgttttaaaatttttgttttaaaaattaataatattaaattgtgtttgattgttttttatagatatgtttgttgtagattttgtgatatttttatatgaattttatatgtttgttattattatgcgtttttttgtttgtgtaggatttatttaaaagtaggatttaatttatgtgaatttttgtatttttagtattagaagaattttttgtataaaggaagtattgaatatattttttgtgattgaatatttttatttagattgtatgcgtatgtatacgtgtatatggtggatttttagttaaaatttatcgaatttaaagtgcggtaaagatacgagatagatattaagaatatttttttgattgtgaggatttatatatggaaatatgtgaaggagggataattttttttataaaattgtttttattagattatcgttgattgttattgttttgtgtggtttttataataattttttttatgtagaagtagataattatatttttgtagaaaataagaggatgaattgattagtgagtaaggggttaaacggtttttaaattatgtttttaatgatgtttattagtttttattttataatttaattattagttttaaaagattttttggatgttggatgtttgggttttttggaatttttttttgtttttttggtatatttataaatagttttgttaaaattggattttgatattttatataattatttgtttcgggattttttttttttttatttttttattaaatattggagtttattgagtgagaaggggttagttttagttatatgtttaatttggaggtttagttaagagttttattagagtattttgtgggaattagtggttttgttttaatatttttttatttttatattatttattgtttttatttaatgcggttgttgagttattattttgttttttgtttagatattggtaattttggttggagcgttattttggttgattttttttattttattgtttttttatgatttatatgtgttattgtttatgaattatgttttttgttataaaatataatttttagtttttttttagtttttattttttttttttaatatttgtatttatagaaatgttttttttttattttttttttttttattattattttttatttgttttaatgtttataaaagtatttttagtttttttgaagtaaaaatggatatttttaaaattgtttatgtaagtatggatgtatatatttataaatttatgtgtatatatttatttatttatggatattggtgaataaatgttagggtagttttattttttataattttttttttgtttggttataatatagatgtattttttgtatttgggtgggaggtagtgaaagaaatgtcgattggtatgattgttgaatagatatatgtataggaaatgtttggtgtttagtttttagtttttatttttgtttttagtatatattttattttaattatatttttagaaggtatttgaagatttattttgatttttttataaatataagaattttgttttattttatgattttttaaattattgtatttttttggtaaattataattgtatataattgtagggtataaagtaatgttatgatatatatatataatgtggagtagttgatttaagttaattaatatatatattattttaaaaattttttatttattttttttgtttgtttgttattttatattttttgattgatgtttttttattttttttaatttgtagtttttgataattattattttattgtttgtttttatgaatttgattgtttttgattttatatataaataagaatatgtagtatttgttttattttatttagaaacgtttagtttattttatttagtatattgttttttaggtttatttatgttgttatatatggtagaatagcgtttattttttgttttttttttttttgagatggagttttatattgttgtttgggttggagtgtagtggcgttattttggtttattgtaattttcgttttttgggtttatattatttttttgttttaggtttttgagtagttggaattataggcgttcgttattacgtttggttaattttttgtatttttagtagagatagggttttatcgtattagttaggatggttttaattttttgatttcgtgattcgtttgtttcggttttttaaagtgttgggattataggtatgagttattatattcgatttagagtagttttttttttaaaaggttatatgttattttgttatatagaatatattttgtatatatattatattaaaaaatttgttagttgatggacgtttaatattttggttattataagtaatattataatgaatatgagagtgtagatatttttttaatatattgattttaagtttttagttcgtaaatttagaagtgggattgttgagttatatagtagttttatttttaatttttttatgattttttatatagttttttataatggttatattaatttatatttttattaatagtgtataagtgtttttttttttttttttttttttagatggcgttttattttgttatttaggttggagtgtaatggtgcgattttggtttattgtaatttttgttttataggtttaagttatttttttgttttagatttttaaataattgggattataggtatatattgttatgtttagttaatttttttttttttttttttattttttagtagagatagggttttattatgttgtttaggttggttttgaatttttgagtttaggtaatttgtttattttagttttttaaagtgttaggattataggcgtgagttattatatttggttaagtgtttttttttttttatatttttattaatatttattttttatttttttaataagaattatttttttcggtgtgaggtgatattttattatggttttaatttgtatttttttaatgattagtgatgttaagttttttttttttttttttttttttttttttttttttttttttgagatagagttttgttttgttgtttaggttggagtataatggtgtaatttcggtttattgtaattttcgtttttcgggtttaagtaatttttttgttttagttttttaagtagttaggattatacgcgtgtgttattatgtttagttaatttttgtattttttgtagagatagggttttattgtgttagttaggatagttttaattttttgattttatgatttattcgttttagttttttaaagtgttgggattataggcgtgagttattgtatttattagtgttaagtatttttttatatgtttgttggttattttaatgtttttttttgagaaatgtttatttatattttttgtttatttttaaattttatttttttattttattttttttgttattgagagtttttagtgtattttgaatgttaattttttattagatgtattgtttgaaaatatttttttttagtcgataggttgtttttttattttgttgttttttttgttgtgtagaagttttttaatgtgatgtaattttatttgtttaattttaaattttgttgtttaagattttggggttaaataaaataaaaattattgtttagattaatgttgtataggttttttttgtttttttttagtattttatagttttaggttttatatttaagtttttaatttatttttagttgatttttgtatatggtgtgagataaagatttaattttatttttttgtatgtgaatatttagtttttttagtattgttaattgaagagattgttttttttttattgtgtgtttttggtaattttattgaaaataatttggttataaataagtagatttatttttgggttttttatattgttttattagtagatgtgtttattgttatgttagtattatgttgggttttgttgttgttgttgttattgtttttagatggagttatgttttgttttttaggttggagtgtagtggtgtgattttggtttattgtaattttcgttttttgggtttaagtaattttttgttttatttatttgcgtagttggaattataggtggttgttattatgtttagttaatttttgtatttttagtagtgatggggttttattattttggttaggttggttttgaagttttgattttgtgatttatttgttttagttttttaaagtgttgggattataagtatgagttattgtgtttagttatgttgttttaagtattatagttttgtaatatagtttgaagttaagtggtgtaatgtttttagttttgttttttttgtttaagattgttttagttatttaggttttttgtgtggttttatatgaattttatattgtttatagatattgtaaatgggattgtttttttgatttgttttttgaatagtttattgttagtgtatagaaatattattgatttttgtgtgttgattttatatgttgtaattttattgtatttatttattagttttaatagcgttttggtgaatttttttagtatgttttagatataatatatattttttttaagtatatattgaattttttttaggatagatgagaaaaaaaaaggttataaaaaaagtttaaataaattttgaagtgtataatattattttgttaattataggtattatgttaaatagtagatttttagaatttatttatttagtataattaatattttatatttttttagtgatagcgttttattttttttagtttttaatttttgttaattattattgtattttttgtttttatgagtttgagtattttagttattttatataagaggaattttgtaatatttgtttttttgtaattggtttattttatttagtataagcgaaattaaaaagtttttgtatagtaaagaaaataataaatagaatgaaaagataatttgtagaatggaagaaaatatttgtaaattatatatttgataaggggttaattttaaaaatgtataaggaatttatataatttaagagtaaaataattaattaaataaataaataatttgattaaaaaatgggtaaagggtttgaatagatgtgttttcgaaaaagatgttatagattaaatgtttgtgtttttttttaattatatgttaaatattaagttttaatattataggattagaaggtgggttttttggaaggaattaggtttagagtttatttagataaatattttaattaattgtttatatgggaatataaattggtttttgatggtgtaaagttattaaggaaaaattataataataaatagatgaataggattaatttttttttattatggaggatatgtatttttaatagaagtttgtgttatttaaaggttatattagtatttattagagttgataggattttttttagtaagattttagtaatgttttttattgaggaattttgggtggagttagtttttgtattatagtattatttaggttatggttataagtttataagtgaaaaaattatggttaatattaatgatattgtaattagtattagtaatattattgaaggaaatgtggatagttaaaataatttaggaggttgggtacggtggtttacgtttgtaattttagtattttgggaggtcgaggttaagagatcgagattattttagtaaatatggtgaaattttatttttattaaaaatataaaaattagttgggagtggtggcgggtatttgtagttttagttattttcggaggttgaggtaggagaatagtttgaatttaggagatagaggttgtagttagataagattacgttattgtattttagtttggtaatagagtgagattttgttttaaaaaaaataaaagaaaaaaagaaaagaaaaaaaaagaattaagtgtttaagttttgttttggagagaaaataaatttatgtttatgtattttgttttagtggaagaattagttgtttttagaattgatttttgttatgtttttttgttttttatagttttagaatttgtaatagtaataaagattttttatttttggaaaaatttaaaaatttcgaataatttttatattattttttgttgtggttattataaagtatttttttttggttaattatatagttatggtttagattattttttattagttgatatttttttttttattttaataattgattagatatttttttaaggttaaatttaaaattttgaattgtggatattgataggtttttgtttgtatttagattatttttagtatttttagattgatacgtagtagtattaagttttttatttttattttgttagtgtattttttgaatgaatataagattaaaatagggatgttagtaatagttagtgtggtttttatgttttattttttttaaaattgttgtatgatattgagagttgttttgtttgataggtatatagggtaggaagagatgttatgataaaaggaatcgttaatttttttgtatatatataagttgattttatttaggtaaaatattgttaatataaataagtattagtaagtttatttttttaagataataaattgtttataaggatgaattgttagaaaaataattgttaaaagattttattatttattttaaataaaataagtaataaattaggtatatattttataggatagattgagaagttggtatagtttaataggtttattaatttttttattgtttatattgtagttattggggagtgggttagtggagtattaaaatgaaattttgaaaaataatttggtttattttggattggatagataggtggatatttatcgtagtataattaatataagatttagaaatagaaataaaaagaaaattttttgtatttataatattagtataaaggtttatgggaattttagttgttttttttattaattatgtaatggtaagtattttgttataaaatagttaagttgagttaaagaatgatatttggaagttgaagaagttttgttaattgatttagatagtgttatggtgtaatgattggtattattaaagttttttaatggaggatattgttgaaattttattggaaagggttttgttaagtgtgatgaatattagtaaggtttttaaatggtatcgttttttgttttaggatatatattttttatgttaagaagaaattggttttgtttatttatttattgttattattattttttttttagatataaggattagtaatttgttttttattttaaattttagattagtggtggttgttttttgaaaatttttgagaatattttgagattatttggataagtggtagatattttatgataattaaggtttgttgatagttaaaagagtttatttttttaaaatgtgttgtaagtttttaggtttattataagtgagttttattttgtgataattagtaggatttaagatatgttgtaattttattaatgttaatttgtttgttgtttaataaaagtttgtgttttcgattttatttgtttagttttgggaatgttgggatttatttttcgtaaaattaaatttatggttttatgtattaagattagagattatggaagtttcgtattgaaagttatttttttttagaaattaatttaattgttatttttttaggaaataagtttttatatttgatattttttatagttagttgagttgagaggattattttttttttttcgtgaaaaagtttagtttattagattatttatgtgattgatggtttggtgagagttgttatattgtttagtttgaattatttttatattgaatattgaaggaaagtgtgagatatataatttaaagaagtatatttgttgtagtataagtgtgttttttttaaaatttaggtagggttttttatttatgaatgggattaaggtttttgtaaaatacgttttatatagtttttagttttttatttttttattttttataatgtaagtatatagcgtttattttttttggaggatgtaagacgttattttggaagtggcgattatgttttttgttagatattgaatttgttggtgttttaattttggattttttagtttttatgtgttttttataaattatttagtttattgtattttattatagtataaataaattaagataatatttttgttatttataaatgtataaaatatatagaatttagtttattgttattggttatttttttaaatataaatttgtatgatttataaatagtgtgttaaatttatataaataagttttgaaagtttttttttaattgtattttagtatatttttgatgtagaattatttatttttgtttaattaattaattaattaattgtgatgtggtgatttaggaaaggaagttaaggtttattttagtattataggataaaagtaggagttatggatgtttttacgtaatataaacgtaaattgtgttatttttagaggagagtaattatggtgatgaggggaattttttgaaataattagaattgttataaagtatttattttaaggtttataaaatgttgttatttattaaaagaagtagttttattgatttgtatagttatgaattaaagtgataaaaataattttagtataatggatataattttttttagaaattgaatgtgaggtagtataatataacgatagagtttgaggggtttggaattatatatataataatttggtttaatagaattgatagaataattttgttttaaaataattaatattttatgtgaagagtgtttagttttttatttttggtttttattatgatttttttatttgtttgaggttatggttttttattattttatttttttggttttatcgtaagggaagatataagaagattttgtaggttagacgtggtggtttacgtttgtaattttagtattttgggaggtcgagttattgtttattagttttgtatttttgtaaaagttgtttaatttttattattttattttttttatttgtagggatgaaaaggttatattttttatttagttaatgtgagaattgattaaaaatatgatgtatggaaagttttgtataattttgagtataaagtaaaatgtttaaaaattgttaagaaattttagttatttttattgtagtatggtgagtattttatttttagaaatattaaggtatataaggaatgattgtttattagaattgtggtagggtgtgaattaatgtagaattttatttgtatagttatattttgaagttcgttttgaattttagatgttatatttatataaatataaagtataatagttatttaaatgtagaattgtatgtttaaaattatatgattatattaattgatgtaaattatagattttttttagggttttgttttttgaatattttgtaacgtattagttagtaaagttttttttttttaaaattgagtttcgtcgtattaattagatcggagtgtagtggcgtgtttttaatttattgtaatttttattttttagaattaagtaatttttgtgttttagtttttcgagaagttgggattataggtatgtattattaagattagttgatttttttattttttttttttagtagagacggggttttattattttggttaggttggttttgaatttttgattttaagtgatttgtttattttagttttttaaagtgttgggattataggtatgatttattacgttttgttagtaaagtttttttatatatttttttacgataaaataagagaagtggaatagtaaagggttatagttttaattaaatgaggaaattttaatgggaattaggaatgagggattgaatattttttatataaaatattattttaaaataaaattgttttgttaatagttgattttgagtttttgatcgattttttagatttatgaatatttggattgtatagttgattttatcgtattgttagggtaagtgttatataaaggtatatttagattttttattgtatataggtggtttttgtaaattttttgtttgtgtgtgttttggaggtgttattaaatttgggggaagtattaggagatatatttgaaaaaattttttttattaagattaaattattaattaatttttaattttttttaatttattagagatatttttatttgtaaataggtaaagattatattttttagttaatagttgttattttgttatattattagatatttagggttgttgttttttgaggtatttatagaattatattttttagtattgaaagatttgaaagattacggtgtttttattttaattgtgagatatgatgtaatttttataaatttataatagtaagatatagtgtaataggattagattaaggttttttggtttgtaattatgttttttttattttttttatttttgaatatatttatttttgtaaatagtttttttgttaagtgggaaatgaatgtttttataaggtttaaatttgtgaatatattattgattagtatagagttaaaataattggggttaaaaatatcgttttaattaaagtgttttatatgtaattggtttaaattttttaagtattaaaaataattttgtaaagaaggaaattttgttttagaagaggatttttatatagtatttttgattagtaattgatgatgttattgaatttagatgttgattcgttttttaatattagattatttaatttaggagtaaggaaattagtaatttattttttataatttggaatgtgggtggaggggtttatagttttttttgagtgagatttgtttgttgttttggtttttggttttgttttgttttttagtatggtgtgtttgaggttttttggaggtttttgtatggtagttttgatagtgatattgatggtgttgagttttttattggttttggttggggatattagacgtaagtgtatattgtgggtgttgagttattatggggtggggaaaatagggagttttgttaatattgtgtttaggttatgtattttaagaaattgtgacgtattttttagagattgtttatttttattatatggattttaaataatttttttattataaaaggagtttggttatttgtttattttatgagatttgtgtaaggggtttttatataggttatttttatttaaatttttattaataaaatttttgtattatatgtttttagggtttttagaggatttagaaataaggatgttaaaataaattttttatatagtatttgtttttattatgttgatttatgttagataaaggaggttttttttgaaaattttgtggaagttaagggaatttaaagggttttttttaaacgattttgggttatgttatttataggatttttggtgttggttttttttttttatatgtgaggatggatttagtggtttttttattatttatttttttttttttttgaattttaatgtttataaagtttgtatttttgtagtgtatgtaggttgtttgatagaagttatatttagtgtttttttttttttgtggggaaaaatttttggaattgaagttgagatttttagtatttggagttattttatagatatagagtatttatgaggtattttttggtgtttaaagaatttaaggtattttttgaaaatttggtttaggttagtgtttattatgaattttttttaatttttttatatttgttttttttatattttttaagtgttttaattagatatgatagaagagatttaattaacgtagtatgagttatataaaattttatttttgtaagttaaaaataattaaatattaaaaatttaataatgtttaaattatatattttgtgtggggttatcgagataatgtggatattgtttatattttatagggttgaaagttaatgggtaagttttgggaatttattgttttattggggttttgttttaaattttataggtttatttattatgtttttaattttttttaattagttatgtttgtttatttttttttttagttttttttttatttttttttagttatgttgttattatttttagaaatttttaaagtttgtatagatttttagtattatgagatttattgaaagagatagtttttttttttttgagatagggtttggttttgttatttaggttgtagtttagtggtgcgatcgaggtttattgtaatttttgttttttacgtttaagtgattttttttttttaggttttagagtagttgggaatataggtaggtaattacgtttagttaatttttgtaattttggtagaaatgagattttgttatgttgtttaggttggttttaaattgttggatttaagtaatttatttgttttggttttttaatatgttaggattatagatgtgagttattgtgtttaggtaaaaagagatgatttttaataaaaaaaagtttttttttttaaattattgtttttttatttgtgaattttttttttaattagaaggaggagaaagaagtttgtttgtattttttattaggaggagaaggggtttagtgtgatattagaatgaaagagtgttggagtttgagtttttttttgttttttaagatttttatagttattattttttatattttggtttatttatgtaaattatatttattttttttagtagttattgtgtattcggttttattttaggtttagattattttatttgattaagatagagagggtttcgatttttatggaagttatataataatagaggagatagatattaatttaataagtatttaataaagaataaaatattagagagttatagtgtattgaagaaaagatattaggtttgtgaagaagagagatatggatttatttattttagtttatatgtttagggagttttatttgagaaagtgatatttagttgagataataaaataagtagatagttatgaagatttaatggacgaaagttttagagagattaaatggggggaaagttttggtgtgggaaattatgtggagagagagaaagacggttagaggggttgatgtatagaaagtaaggaaatggagaggtagaagatgaggtaggatatagagagaaagttaggagttttattattataggttttgatgtttacggtaaaaaatttgaattttattttatttatttatttatttatttatttattttatttatttatttatttatttttttaagatggagtttcgttttgttgtttaggttggagtgtagtggcgtgattttagtttattgtaagttttattttttgggtttatgttatttttttgttttagtttttttagtagttgggattataggtatttgttattacgtttggttaatttttagtatttttagtagtgagggtattttgttatgttaattagggtggtttttattttttgatttcgtgatttatttgttttagttttttaaagtgttgagattataggtgtgagttattacgtttggtttattttttttttttttgagacggagtttcgtttttgttgtttaggttggagtgtaatggtgtaatttcggtttattgtaattttcgtttttttggtttaagtgatttttttgttttagttttttaagtatttgagattataggtatttattattatatttggttaatttttatttttttgtatttttagtagatatcgggtattattatgttgattatgttggtttcgaatttttgattttagataatttgtttgttttggttttttaaagtgttgggattataggtatgagttatcgcggtcggattgaattttatttaaatagatacgagaagttattgtatggttataaggagagttaatttatatttaatttatttttattttattttatttttttggtgatggggttttgttttgttgtttaggttagattgtagtggtataatttcggtttattgtaatttttgttttttgggtttaggcgatttttttgatttagtttttagagtagttgggattataggtatatgttattatatttggttaagtttttgtattttttagtagagataggattttattatgttagttaggatggtttcgattttttgatttcgtgatttatttattttggttttttaaagtgtagggattataggtttgagttattgcgttcggtttatatttaatttttaaaattaattttagttattttgtggggattggaatgttggggtttataagtggttaggaagattatttaggagtatagtagggaattttttagcgaaaataggtttgtggttttatggagtgtattagtgataaagacggtgaaaaagataaagtggatagatttggtatgtatttttttttagtttgttaatgaattattgtaaagggggtagaataattaagtttatttttaaggattttgttttgataaataagtgggtggtagtgttgtttattgagataggaaaaattatgggaggaaattatttgaagtgggtggttggaaataaaagttttgtttaaatttgagatgatttattgatatttatgtggagtaattagaaggttaatggtatttaagagatttatggtgaggttagggttttaagtatttatgttggcggtattaatacgtgtagtgtgttaaattttagggagtggaagaggatatatagggagatggattgtgtggagaaaaaagaatagggtataggttagtaaagggggttgagaaagagtttagggatgttggagaaaaattaagagaatatgatgcgtgtacgttaaggaaaatagattttttttaaggagaagggagaggttaattgtggtgagtattattaagcggagggggaagtgagaacgtgatagagaagtaagtgttgggtttggtggagttgatatttgtagttagtggagtatttagggaggaaattggattggataatttgaagagcgagtagaagtgaggatgaggttaagattgattgttttgagtagagagttttagggaaggattgtattttgggtttagggagttagttggattaaaaggaaaaggttaaagaggttgaagagaagtaggaggatttgtgaattagagatgtttagttattattagcgaggaaatattagaaagtttttgtgtgtagtgatgattatttatgtagaaggttatatagttaatatttaatatagttagtattttatatagttaatatttattagtgatatagaatatattagttattattttaggttatgagaatggagtgataaataaaatgaattcggtcgttattagtatatgttatgtaatattttgtagtgattgtgtattaggtttgtgaattttagtatgtaattttaataatgattttgttgtatttgtggtgtttaaaaatatatatatttttggaatttaaaattgagaggttataagtaaaatttagtattataaattgagtgttggaaattagattgtagtttaaatttgagtatatagaaagttttttttttttatgttagtagatgttttttgtgtgaggtttagttggattgtattattagatataaattagtgtttttgttttatgtttttagaatgataattttttatgaaatttatagaagaatagaagataattgtaaaattatgatgaagatagtaattgttttagaattaaggaatataaaaaataatgtgagttgtagttatagggattataaaagtttaaatgggaatgtatttgagtatgtgattagtgttaagaagagttattatttaattttatatttaatagtaatttcgtgaggattacgttattattaaatgtatttgatagattataaaaaggtttatggttggtaaaaattgatttaagtagaagagattatgtttttatttaggttttttgattttagagtttgagagtttgtttattattagtgagtagtgattatattgtgtttgaattattgatagaatttttgatatttatatgtattaggttgttttttagagtggggatagagatgtaagggttgttagtttcgatgtattggggaaatttttatttattttgtatttattattttaaaagttttgtatgtttataatggttatgtgttgaagaatataaggaagtattaaattatttttttttttaaggtttgattagtaagttgggttagagttattaaataaaatatatgtttttagtgaaatttgaattttagatataaaattataatttattgaaaatttaaatttaattgggtattttttggttttatttgttatatttgttaattttaagtgtgatatatggatatggattatagtgttaattatgtaagttacggtgatagtaattttatatatgtttatttttaattttttttgtaagaaagtgtttagataatttagggataaaaagatagatattgtttgatttagggtgtatatttttttgttattatttttaaagggtaaagggagatttttgtaggttttgtttatagtttggggagttgtttatttttgtaaagtgtttgtatgagaatgttatttttttggttttttttttttcgaggggatttgattataaaattaagagttttgtttttggttaaggttggtaatttgatgtttgttagtattgttgggagtgggagattgaaagaaatgagttagttggggtatttaacgggaataaaatagttgtggttgtgatttattattatagataattagtggattagtggtagagaaattaagaaaaaagatgatgtgaatgataaatgatatgattagtgattgtttggtaaggtaaggaaattattaaattttggtttttattaagtttattttttggaaagatagtattgtattgggagtagaattttataaaattttttttttatataggattaagatttttaataaatattttttaatgtaatttttagttgttttataattaatagtagtttgtttaatatagatttttttagatgatttatatttgtggtatttatttagggatggtttattatttttttttttttttttattatcgttggggaacggtgataatgtttggaataatttttggttgttataaataggggttttttttgatatttaatgagtagaagttagggatattgttagagaatttataatgtttagaatagtttttgttattaataaggaattatttggtttaaaatgttaatagtgttgaggttaagagtattggtttatattgtgttttttttgaaaattttagatttatatttgttatatatttattatatagtttagttttttatttttgtttgttttattataaataattagatagttgtataaatttaattatttttttgttgaatttatttagttaatgtaagtttaatatttttatatttattttttgttttatgtaatattttttaatatttttatgagttgtcggttattattatttttattaatttttaataatttgtttttgtaagttataaatagtgatgttgttgaaattattttttattaatatgttttagatttttgtagtgattttatatttgatattatttataatgtaaaatgtttttatttatttatttcgtttttatttaaggattatttttaagttatttttgttatttttatattttaaatataaagataaaaatattaaaaatatagtgttttatatatgtgtatatttttatatatatatgtatgtatatttatatgtattgaaagtatagaagtatatgttattaataagagttttgagatattttcgattatttatttttattagatgagttgtggaaataagtttttttaattgaatttttgagttttgtggatttagaaatgtaaaggaaggtttgtggatatttatagggattatgattttattttttttaaaatttttttgtattttttaattgtttttagtataaatttaaaattttaatattatttaagaggttttttaatatttggtttttgtgattttttcgggttaatttgttattttttttttttttagtttttttgttttagtgaatttttttttagttttttgaagaagtttattaatttaagtttttgtatatgggattttttaaatttgaaatgtgtttttcgttttgtttaaatagatacgggttttattttgttttttggtttatatttgtttaatttgttaagttatatttgaatcgttattattaagagggtttttttttggtattttaatgtaattgagattattttattattttttgttttagaattttatattttcgatattttttatttttgtttaagtttttgtgtgtttggtgttgggttattatttttattgttttttaagtttttttagcggagtggagaggtttgttttttttcgtttggatttttagaggtagcgtagattaggtataaggttagtattaaggaagggtttagaggatgaacgcggtgggtgttgtttaaggaatcggtaaatatgtgggatgagagaaggagtagagtgtttttggggtggaggtttttaggaggaggcggcgcgggttgcggtgttgggcggatttttttttagtttttgtttggaggtttttagaataggttggaggtagggaggggggttttaaaagtttggggattagacgtggttttttcgtttggttttttaggttttttttcgttttaggaagatagaggaggagtttttgggttgttggtggtgggcgttgcggcgggggtcggttaaggtttttagtgttcgtattttatttagggagtttcggatggcggcgttattgttagtgtttttttaggaggtcgtttgtgtgattggatcgttcgtgtttttatagtacgttttttggagtattttacgtttgagtgttatttttttaatgggacggagcgggtgcggtatttggatagatatttttataattaggaggagaacgtgcgtttcgatagcgacgtgggggagtttcgggcggtgacggagttggggcggtttgatgtcgagtattggaatagttagaaggattttttggagtagaagcggggtcgggtggataattattgtagatataattacggggttgtggagagttttatagtgtagcggcgaggtgagcgcggcgcggggcggggtttgagtttttgtgagttgggaatttgagtgtgtgtgtgtgtgtgtgtgtgtgtgtgtgtgtgagagagagagatagagagatagagagagagagcgttatttgtgagtatttagaattttttttattttgagtaaggagttttgagggtataggtgtgtgtgtagagtgtggatttgtttgtgtttgtgaggttgttgtgggaggggaggtaggagggggttgttttttatttttggaggattttgtggggaggtgataagggaggtgggtgcgggcggttggagagagaggtgattttgattgtttcgggtttttagagatgtagggaagggaaatgtaaggggtgtgtggttggggtgaaggtttaggggaggagagttgaggggtaaggaaggtttgggataatgtgaggaggttagttttagattgtttttggtatatattttttatgtaatttttgaaataaaagtgtgtgttgtttgtttgtaaaagtattagattaatttttaggggaattgaggagatttttgaggtatttttgaagtttttttaggtttaaattttttgttagttttttgttttttattgtgtatatttttatatagtagaaatgattgtgaaattaattttttgaattaaagttttaatatagttattattttattataatgttaatagttttttagtagttatatattatttttttatatataatagttgtgatataatttattttatttttttttttgttgatttttattatgatatttattaaaatttgaaaatgtatgtttttggttaatttttaatttatattttttttatttataatttttttgaattattttgatttatttattggttagttttaataattgttgtaagaattttttattgtatttggtagggaatggataatgatttattgtttaatatttcgagggtttagtattttttttagtgattttgtgggttttttgtattgtgagattattaatattttattgatatttgatttagtatttgttttagtttgtggtttgtatgttgattttgaaaatttttttttatgttaagaatttgaatatttttatataataaaatatgttgtaaaatttttattaatgatttataatttattttaaatttgttattttgtggtattgttgtttttaggtttttttttatttttaaaaaaaattgtatttattgagagtttgttagtgttagggatttttttgggtataagtattttaagtgacgagttttagatattgttttaatttaaatgtgattttggaaagaaaaattattttataatgataggtttaataataattaagtttgtgttgtatgggagatgtattgattagttaaatgtaaatataagaatttttaaaattaaaatgacgttttttaatttttttttttgttttatgatttatgtttttttgggaaagtaaaaatttggagaattatttttgtttgttttatttttttaggggtagaattatttttgtggtgttttaaggtgtgagtgtatggcggtagtatttttaaaaatttatattcggtttcgttatgtatttaattttgtttcgttatttattaatattgttttaaattatatatttttgttaaggtgtataaggatgataaataggtgttaagtggagtatttaagtgtgatgagtttttttatagtggaatggagtgtgaagttttatgattttataaattgaaggttatttttaggtattgttttatatattttatatgtattaatttttatataattttaagaggtaaattagtataattattttttattataggtgataaagttgagatatagaagaattaaatttttaaggtagattttggatttgaattaggtaatttggtttagatattagttttaattattatattttgtatttttaaagatttgtaaatattttgataatgtatgataattttaagttatgaagaaataaatataattttttataatattttttaaatttaataggtttttattattaagattaagttttaggttgatgatattgtaaggttatatggttagttgtgttggaggtttggttaaggttagagtttgggtttgtagagaagtagataaatagttaaataaggagatttattttgtttttatgatttattttttttatttttttttttttagtttattttaaggtgattgtgtattttttaaagatttagtttttgtagtattataattttttggtttgttttgtgagtggtttttatttaggtagtattgaagttaggtggtttcggaatggttaggaagagaagattggggtggtgtttataggtttgatttataatggagattggattttttagattttggtgatgttggaaatagtttttcggagtggagaggtttatatttgttaagtggagtatttaagcgtgataagtttttttatagtggaatggagtgagtagttttttgattttataaattttttatttattaagaaggggattgtgtttatttttgagtgttaggtttttttttttcgatattttatttttatttgttttatgtttttatttttattagtataggttattgggggtagttttgtaggtgtttttagaaatatttgtattttttggagaagtagtttcgtttgttaggtaggagaggttgttttttttttgaatttttttatgatgttataggttagggttatttatttttttcgggttttaggtattgtttttgggtttgagattgagtttttggtgttgttgatttgagttatttgttgtgatttgggaagaggagaagtgtaggggtttttttgatatgaggggagtttaattttagttttgttttttattagttttgttattttagataaattatttagttttattgagttttaggttttttgtggattagatgttgaatttttgttttatattaaggttgtaatatttgaatgagtttgatgtttgaattttgtaattgtttagtgtgatttgaaattttttttttttttagaaatggttagttattttagtttttgtgggttagattttttttttatttttaaagttttgaattttagagttttaattaaagaggtttaatttggaataaatattaaatttggtttttttttttaggagtacggtttgaatttgtatagagtaagatgttgagtggagtcgggggttttgtgttgggtttgtttttttttggggtcgggttgtttatttattttaggaattagaaaggtgaggagtttttggtagttggttttttttataggtttttttggaggaggaattatggttttgttgaggttagtttttagtatatgagtggttttgaataaagtttttttttttttaaacggttttaatgttttgttaatttagaaattattagtgtatggttattatgtgaaagtataatagtttgtggtttgtagagataagaggaaggttaataagtaggggttttttggtttgagattttggagtagattaaggaagagttattaagattaatggaattatattggattttgtgatagatattttattttttatgggttatatggtttgtttttgtttttttttgttttggttggtgtgggttgtagtgatagagaatttttcggtgggagatttggggttgggatattgtgttggaagatagatttgtttttataaattttaagtgtatatattttttttttttttttaggatattttggattttagttaagaggtaatattttttaatttttttttagaaatagatacggtttttttagtgagaggtgaagttagttggatttttgggtcgggtagggatttgtagaatttttttgttttaggagaggtttttaaatgtattaattagtgttttgtaaaaatatattaattggtattttgtggttagatagatgtttgtaaaatggattaattagtattttgtaaaatggagtaatttatattttgtaaaatggattaattaatgttttttaaaatggattaattagtaggatatgggcggggataaataagggaatataagttggttattttagttagtagtagtaattcgtttaggtcgttttttatgttgtggaagttttgtttttttgttttttataataaattttgttgttgtttatttttcgggtttgtgttatttttaagagttgtaatatttattgtgaagattcgcggttttatttttgaagttagcgaaattacgaatttatcggaaggaataaattttggatatattagaattgatggtagaggtgataaggtatgagatagaaataataggaaagattttggatttaaatttttgattaggtaatttatattaaaattttttttttttatttagaaaaggtttgtgttttgtgggattattggttttgggagatttaggaatttgttttttttttttttgtagtgtttttatttgagtttttgaaagagaggaaaagaaattgttagtagagttaggttgaaaataatatttttttttgttttttgtaggatttttgagttgaagtgtagatgatatatttaaagaagaattttttgttttagttttgtaggatgaaaagtttttttttttggttgttatttttttataagagagggtttttttaggatttggttgttattggtttagtaattgtagaaaatgtttttttttgtggtttttttagtttttgtttttggtttgaagttttatagttttgatggtagtgttttatttttaatttttgtgtttttttttgtttaaattttatggttttttgtgtatttgtatttattttgtattataaatatattatattattaaatgttttttaaagatggagttaaatattatttggtttatttggttttaaagataaaaaatgaaaagaaaagaaaaagggaaggaagattattttttaatagaataatgatttttatgtatatgttatgagtatgtgaggtaatgtatatgtaaaataatttgatttagatattttatattataggtatatattaaaattttattttgtataatataaatatattatataatttttatttgttaattaaaaaagtaattttaatgtttaaaaaggtaatgtataaaaattgagaatagattataataattgaaataaatttggtaattatgagatgagaaattagttagtaagttaattagaatttttttttatttcgtttataatattttgtatttataattgtaaattagtgtatagtgttttattttagagattttaataatatagtgttattaaaggatttgtatagattttagagaaagataaatttagaagacggaggattttttattatgtgttatttgagagttagtatgaaatgttaaatttaaaagtatataatttagaggtttattttaaagtaattatttgagtatagtttttttattgttagagacgattgttattttatttttaattaaattaaaatttgtttttatgtatattttatttttagttatatgttatttgtatataagtagtagtataatatatatatataaattttatgagtataaattttatagaaatatattaagttgataattatgtttgttttgtttgattatagagttgtaataaagaggttttattttttaagttgaggaaatgatttttttattttatatgagattcgtggtgtggaattataaggtagaattaaaatgtgtggaatgagtattttagtgaagatgtgttttgttgttaataataggaaattatatttagtggttttatttttttttaatttattattttatatagtcgatagatttaaggttgggtatttttagggatgtttaatttagtaggttagtgttattattagtgattttggaatttcgtagtttatttttttattatatatagtacgttagtttttttgagatggtagggtgatttatgtagtagttttaggtttgttatttatttataataatttttaaaggtaggaaaaggatattttttttttttgtgtgtttttataaggagtaattaaattgtttttagagtgtttttagtatttatttttttatatattggaatgatcgtgggattatataggtttagataagttaggatttaatttttgtagagtgggtttgatgtatatgggaagaaaaggagtaaaattatatatttttaaaaataaagaaatggtggatggagtagtagagattgattttattatagggaaatgatagattgtggtattattaggttgtaagtatttgagttaatttttatacgaaggtttatagatttttgataggtatttttaatttagggttttgggtttttatatatatatatatatatatatatatatatacgtatatatgtatatataggtgtatatatatatatatatatagagagtattaaatgttagttattaatttaattataattaaataaaaaagtaaatagaattgtttttagaatttaatttatgttgatatgttattttatgaggtaaatgtattttttagggaaattgaaaaaaaagtagaataaggaatgattagttttataaagttttaaaatatattatatatttatttttaaaaatgtatttgtaattgtttttttttaaattaaatatgttagtaagatagagtttagaattagaaatagagttgagatttagttttagtttttgtaagttgtattttaaatttattttttttattaaataaattttggataaataaaatttgaaatataaagagaaaatataaaatttataagatagatgttatttttaatattattattattattataattatgtttgaagataaatagattttttaattttttatgtgttgttggtgggagtgtatgattttataaatatttgataatttggtaattttttaaaaagtttaatatatgtttgttttatgatttattaattttattttttggaatttatttaagagatagaaaaatatatgtttttacgaagatatgtgtttaagtgtttagaatagttttagtcgtagtaggtttaaattgaaaataatttaaatttttattaattagtaaatagataaataaaatttaattatatttaggtaaggtaatattatttaataataaaaggggataaaattagatttatttggtaggggagatattatgaatatgaggatagtttttttaaggtaagttttaatttttgtattttagatgatgagattatttaatgggtataatgtatgtgatttgggtaatggatattgtagaaatattgacgttattattatgtaatttatgtatgtattaaaattatattttattttatgtatttatataaatgaaaaaagataaaaagaaatgaaaataaataaaatgatgatatatattataaaatttgtgaattttaataatgttaattaagtgaaggaaattggatataaaagattatatgttgtgtgattttatttatttgaaatatttagaaaaggtaaatttatgtatataaaaggtagattattgggtgtttagggtttggggttttagtgggatttaaatataaatagagaaatttgggatatgatagaaatgttttaaaattggattgttgtgataattgtttaaatttattaatttatttaaattattaaattttatatatatagtgagtgaattttgtagtatgaaaattatgttttagtaaatttgttaaaataatttttttttaaaaaataagatttcgtaagtaagataaaatttagaagatataaatgaaaaaatatttgaagaaaattattgattttattgtatgaagaaaataataaaattaaaagaagtatatgacgtttaggaaaaattttgattacgtaaggtagataatgggttaatttttttatgaaaaattgttaattattaataaataaatttatggaaatgttatagataattgggtaaaggatatagatttattatagaagagaattttttaatagtcgataaatataaatatttgtttaaatttattaatgaatagaaaaatttaaattcgaatagtaatgtaataaattagtttttttattttaaaattaataagtataatagtttgttttaaatttaaggatttagaagattttaagggaatagatttttttatattattaggattttgagttatggtagtgtagtagtatttattaaaatttaaaatataattgttatacgtttgatgaaagtaataaaaattttattttaaatatttattttaaagaataatcgtatatgagtttaaggagatataaaattggtcgtttgttgagttatagtttggaataataaaaatatttttagatttaaaaagaaaaattgattaatttgttttgattataaaaattttgtatattttaaaaattatgtagtatgtgaagtgatagtatattgttattgtaggatgatatttggtgttgtgtggggtattgtgagtatatattggtgtaattttgtgagtagttgggataatatagtatttttattttggattgttatagtttcggtaaatttttttttatatgtttatgatgatatataaaaaatgtaataggggagaaaagaaatattttttatatttagatagaaaaaaggtaaattgtggtataattatagaaagtaataatatttagggttttaagtaaattatgtaggattattaatatggattggaaaaaaattataaattataatgttagttaggagatggaaaattatgagaattgttattgttattataagagtaaaaagatatatagattaaattaaatggataaattggaaaataattttatttttaaaattttaattagttgtggattaaaaagtataaaaattttaaattttagagatgaataaattttatatatgcgagtagggttaagtgtttatttttattttttggtttatttattgaattttaatatgggtggaagattgagtttggttgagaaagggagattgtgagggagtaaagataaattagttgagttgtaaataacgttgtgggtttgtgtgatgtattataatttatagagggtttttgaataatatatatttattttgttttgttagttgattttttttttagaattttttttgattttatattgttgttgtgggaattaaggaggtagatataagataacgaatatttttgtagttttgtgtaaataaagattaggaaggaaattaagataggaataatgtttttaattattttgatttatttggtatttataattgatatataaattgataatattttataattatagaatatttatttttttatattgtataaagattatttatgaaatggaatatatattatgattataaaattagttttaattatttttataagaataaaattatttagagtatattttttgaatataattttattaaattataaattagtaagattgagaaaattgtttaaatttttggaagtaaaataatatatttttaaataatttgtggtttgttaaagaggatattagaaggaaattagaaaataattttaaataaaataatattataatgaatttttaaaattttcgagatgtaattaaggtagtttttagagaaaaatatttagttttaaatgtttgtattataaaaagataaatatgtaaaaattaaaggtgtaaatttttaatttaataataaaaagaaataaatttaagttgaaaaaagtagaagaaaaaagtaaaggggtgaggaaatcgataatattatttttttggttttgttttttatttgtttattatagagtataattgtgttagtttttttttatattgttagaaataaatatttgaggttgggtaatttatgaagaaaagaagtttaattgatttagggttttgtaggttgtataggaggtgtggtgttggtaattgtttttggtgagggttttaggaagttaataattatgggggaaggaaaggggggtttaggtattatatggtgagagtagaagtatagagaaagtggggaagagtcgtatttttttaaataattagattttatgtgaattgagtgagaatttatttattatagttaggatggtattaagttattgatgaaggatttgttttatttttcgattaaaatattttttattaggttttatttttaacgatggaggttatattttaatatgagatttggaggggataaatatttaaattatattaataaaataattggtttaatgtatattgattttgtaattagtaatattatttaaatttatttattaaatttatgagtttgtttattgtttttattttttaagtatttgattatgttaagagtaaataatgattattttatttggatgtaattatttttttgatatattttttttgttgttattattttttaattcgtttagtattttagatatgaaggagatagttttaaatattttattgttgagattaatgtgtgtaattgggtagttattattttttagattgagaaatatttttttaaaataagtttgaaaatagattttttaaaaattaaggttaagtgttgaattttgttaaattatattttatgattattaaggtggttgtatgtgtatttttttttttttagttaacgtagtgaattatattaattgatttttaaatgtttatataattttgtattttaggaataaattttatttggtcgtgatatagtagttattttttatattattgaatttatttggttaatatttttttaagaatttggtttataagagttattggttttttaatttttattcgttgtagagttttttttaggttttgaagtaaagtttatatagattttattaaacgtaattgtaagtgttttttttttttttaaatatgtttgaagtttgtataaagttagtgttgtttgttttttaaatatttttaaatagttattgaagttagatgaatttggggttttgttttgggaaagtattatagaatggatttattttttttatgatatgtggaattttttttgttttatgttatttgttagttttagtatattgtatattttgaataatttatttattatatgtatatttatttttgtaaagttgtttataatatttagtattattttatgttgataaatttgtaagattataataaaagttatgaaatttgtgtaattggagttttagagggagatgataaatgggtgatgtataaagagtgtttgaagaaagattgattattttttaaattcggataaagatttaaatgtaaaaatttaagaatttgtgtaaatttaaacgaaaataaatttaaagaaatttatgttaaaaaaaatttcgaaagtaataagagagaaatgatattttatgtataggagaaaataaattaaatgatagtggattgtttaatagaaattatgtagattagataaaagtggtataagatattttaatggttgaaaagaatgttaatttagaatgtatatttagtaaaaatattattataaaatgttttattatgatatttttttttttttttttttttttttttttttttttgtttgttttttagatggagttttgttgtgttatttaggttggagggtagtggtgcgattatggtttattgtagtttttgttttttaggtttttgtaatttttatatattagttttttgaatagttggaattatagatacgtattattacgtttggttaattttttgtatttttggtagagatagggttttgttatgttgtttagggtagtttcgaatttttgagtttatgagatttgtttgttttggttttttaaagtgttgggattataggtgtgagttattatgtttggttatgatatatttagaggaaggaaaattaagagaattttatgttagtagatttatgttaaaataagggttaaaggaagtgtttgaattggaatagaaatgataatggaaggaattttggataattgggaaaaaagtaaataataagtgagtaaaaatatggttagatataatagatttttttagttttgtaaattaatttgatggttgaggtaaaaattgtaatattgatagatgtggttttgatgtaagtagagaaaattaaaaatatatattatatatgcggaagtggaaagggatataaaggaggtaaagtttttatattttagttaaattggtaaaatgttagtattagtagattatgataagttatgttaatagatagataaattataaaaattatataatgagataaattaaaaaatgattgatttaaaaatggaattttaaaaattgtttaaggaatatattggaatataggaaaagaaattagagaagaaaaaattaaaggaaataaaaaagaaaataaaaagtagatggtagttataagagtttatatattaataattgtattatatgtaaagtgtgtaaaaagataaatgttagagtgaaaaataatgatttatcgatatgttttttataagaaatttattgtaaatattatttgtttatttttttttggtttttttgtgattgaggtggtaaaaggttggtgtgttaatatttttttgagcgtgtatatatttagttagtttgtgatagtattggggttttgttttaattttattttgagattagagtgggtattcgggattcgggtgaggttaagggagaggttagaaagtgggagtagatatttttaagtttgtatggataggggggtttttttagttttgagagcgtagagaggtttggtttttgttgtttgtagggagggtcgggagggtcgggagggcggggtttttaatttatttcgtggagtttgtaggtagtttttgttatattttttggtagtttgaggtgcgcggtttttttcgttgggtttaggttggtatatggggtaagggtgatgtttttgtaaattattttcgtagtatttagggtgtttcgggttttttttcgtcgggatatggcgggggaggtattttggggaatagattttagtcggggtttggttgttaggagtattaggtttggtcgttattcgcggagataaaattttgggaggttttaggtagagtttttttttgaggcgtagaaattgggcgttttcggtagggtgggatagtggttttgtcgttggtttggtttttaaagtgaggttatttttatattttattttaggttattgaagggtggttttagttttatgttttttttataattgtagggtgagagtagtaacgtaggagtggtgaaggttttgggtttgggggcggtttcgttagttgtttaagggtcggggtagtgtagttagatgttttagtgacgcgaggtataggggatatggggtataagagttttattacggttattgtttcggtagtggatgttgtcgttatcgtttgtaatttttcgtagtagtcggttattttggatagtttattattgttagtattattatttattttaaaatattaatgtgaattttagttggtttttttagattattattattataattagttttttttttttataatttgttttttttttgtgtgttttttttttttttttttttttttttgaaggagtatgatttagtggttgagtttgaggggtatataatttggttttatttatagtgtattatttattagtgtatttttgtaaaagttgtgttatttttatcgttgtagtttttttatttgtaagtatgaaaagggtgtttattttattgagttgatgtgagaattaaataaaaatatgaagtatagaaagtttttaatataattttgagtataaagtaaaatgtttatttttattgtagtatggtgagaattttgtttttggaaatattaaggtatataaggaaggagtgtttattagaattgtggtatagtgtgaattaatgtagagttttatatgtatagttatattgtgaagtttattttgaattttagatgttatatttatattaatataaagtataataattatttaaatgtagaattatatgtttaaaattatatgattatattagttgatgtaatttatagtttttttttagggtttttttttttgaatattttgtaatatattatttagtatagtttttttatatttttttttatgataaattaaaagaagtataatagtaaagggttataattttaattaaatgaggaaattttaatgggaatcgggaatgagggattgaatattttttacgtaaaatattaattattttgaaatagagttgttttgttaatagttgattttgagtttttgatcgattttttagatttttgaatatttcgattggatagttgattttattatattgttagggtaagtgttatataaaggtatttttagattttttattgtatataggtggtttttgtaagtttttttttgtgtgtgttttggaggtgttattaaatttgggggtagtattaggagatatattttatataaaattttttatttagattaaattattaataaattttttattttttttaatttattaaggatatttttatttggaaataggtatagattatattttttagttaatagttgttattttgttatattattagatatttaggggttgttgttatttgaggcgtttatagaattatagtattttttagtattgaaagatttgaaagattatggtgtttttatattaattgtgagatatgaagtaatttttttaaatttacgatattaagatatggtgtaataaggattagattaaaggtgttttgatttttaattatgttttttttattttatttatttttaaatatagttattgttgtaaatatttttgttgttaagtgggaaatgaatgtttttataagatttaaagttgtgaatatattattgattagtttagaggtggtttataataaggatttaattaaagtgttttttatgtaattgggtcgaattttttaagtattaaattaaaataattttttaaagaaggaaattattttagaagaggatttttatattgtatttttgagtagtaattgatgatgatattgaatttagatgttgattggttttttaacgcgggattatttaatttaggagtaaagaaattagtaattttttttttatgtttgggatgtgagtggtgggggttatagttttttatgaatgtgagatttgtttgttattttggtatttggttttgtgttgttttttagtatggtgtgttttaggttgtttggttggaggtttttgtatggtatttttgatagtgatattgatggtgttgagttttttattggttttggttgtgggtattcgatttaagtgtatattgtgggtgttgagttattataaagtgggtaaagtagggagttaaatttgttattatgtttaggttatgttttttaagaatatgtgacgtttttaatagggattgtttatttttattatatggattttaaattattttttttataaaaggagttttattatttgttttttttatataaggggtttgtgtataggttatttttttttaaatttttattaataaaatttttgtattatatgtttttagggtttttagaagatttagaaataaggatgttaaaataaattttttatatagtatttttttttattatgttgatttatgttagataaaaggaggtttttattgaaaattttgtgggagttaagggaatttaaagggttttttttagatgatttagtgttatgttttttatagaatttttggtattggttttttttttttatatgtgaggatgtatttagtggtttttttattatttttttttttttttttttgaagtataatttttataaagtttgtatttttgtagcgtatgtaggttttttgataaaagttatatttattgtttttttttttttatggggaaaaatttttggaattgaagttgagatttttagtatttggcgttattttataggtaaataatatttatggggtgttttttggtgtttaaagaatttaaggtattttttgaaaattcggtttaggttagtgtttattatgaattttttttaatttttgtatattattttcgtttatatgttttaattagattttataagaagagatttagttaatgtaggaaaaattatatgaaattttatttttgttaagttaaaaatagttaaatattagaaatttgttaagatttaaacgatatattttgagtggagttatcgagataatgtggatattgtttatattttatagggttgaaagttaatgagtaagttttgggaatttatttttttattcgggttttgttttaaattttataggtttatttattatgttttcggttttttttatttagttatttttgtttatttttttttttagtttttttttgtttttttttagttatgttgttattattttttgaaatttttaaagtttgtatagatttagagaattatgaggtttattataagagataattttttttttttttgagatagagtttggttttgttatttaggttgtagtgtagtagtgtgatagaggtttattgtaatttttgttattaaagtttaagtgattttttttttttagtttttagagtagttgggattataggtaggtaattatatttagttaattattgtaattttggtagagattgtgttttgttatattgttaaggttggttttaaatttttgggtttaggtgatttttttattttttaatatgttaggattatagatgtgaattatcgtgttttgttgaaaatatatgaattttaataataataataaaaaattttttttttttaaaattattgtttttttggtcggttgtagtgatttatgtttgtaattttagtattttgggaggcggaggtgggcggaatacgaagttaggagatcgagattattttggttaatatggtgaaattcgtttttattaaaaataaaaaaaattagttgagcgtggtggtatttgtttgtaattttagttattcgggaggttgaggtaggagagtcgtttgaatttgggaggtagaggttgtagtgagtttagattatattattgtattttagtttggtaatagagttagattttgttttaaatataaaaaaaaagaaaaaaattattgtttttttatttgtgaatttttttaattaggaggaggagaaagaagaagtttgtttgtattttttatagggaagagaaggggtttagtgtgatattaaaatgaaaaagtgttggagtttgagtttttttttgttttttaggatttatatagtgatgagtttcgagaatgttggtttatttatgtaaattatagttatttttattagtagttattgtgtattggttttttttttaggtttaaattattttatttgagtaagatagagtgggttggtttttatttatggaagttatataattatagaggagatagataataatttaataattatttaataaagaagaaaattttagagagttattatgtattgaagaaaagatattaggtttgtggaaagagagaattggatttatttaattttggtttatatgtttaggtagttttatttgagaaagtgatatttagttgagataataaaataagtaaatagttatgtgaagatgtaagggttaaatgttttagagagatataaattgggggaaaattttggtgtgggaatttatatgtagggagagaaagaaggttagagggattgacgtaaaggaagtaaggaaatggagaggtagatgatgaggtaggatgtagagaggaggttaggagttttattatattaggttttgatgtttatagtaagaaattttaattttatttaaatagatatgggaagttattggatggttataaggagagttaatttatatttaatttttaaaattaattttagttattttgtggggattggattgttggggtttataagtaaaaaggaagattttttaggagtatagtagggaatttttagggaaaatagtttatggttttttggtgtgtattagtgataaagatagtgaaaaatatgaagtggatagattcggtatgtattttgtttaggttgttaatggattattgtaaaggggatagaataattaagtttatttttaaggattttgttttgataaataagtggatggtggtgttgtttattgagatagggaaaattgtgggaggaaattatttgaagtgggtggttggaaatgatttattgacgtttatgtggaataattagaaggttaatggaatttaagagatttacggtgagtttagggttggaagtatttatgttgatggtattaatacgtgtattttgttaaattttagggagtggaagaggatatatagggtaatagtttgtgtgtagaaaaaagaagaaggtataggttagtaaaggggattgagagggagttttagggatgtaggagaaaaattaagagaatataatgtttgtaagttaaggaaaatagattttttttaagaagcggggagaagttaatgagtattattaagtgggtgaagtgagaatgtgagagagaagtaagtgttgggtttgttggagttgatatttgtagttaatggagtatttaggatggaaaatggaatggattatttgaagagtaagtagaagtgaggatgaggttaaggttgattgttttgagtagagagttttagggaaggattgtattttggatttagggagatagttgaatttaaaggaaaaggttaaagaggtcgaagagaagtaggaggatttgtgaattagagatgtttagttattaatggtaaggaaatacgagagggtttttgtgtgtagtggtgattgtttatgtaaaatattatatagttaatattttatataattcgtatttattagtgatttagaatatattagttattattttaagttatgagaatggagtgatgaatgaaataaatttagtttttattagtatatgttatataatattttgtagtaattgtgtattaggtttatgaattttagtatttagttttaataatgattttattgtatttgtagtgtttaaaaatatatatattttaggagtttaaaattgagaagatgtaaataaaatttagtattttaaatgtagtgttagaaattagattgtagtttaaatttgagtatgtagaaagttttttttttttatgttagtagattttttttgtgtgaggtttaggtatattgtattattagatataagttagtgtttttgttttatgtttttagaatgataattttttatgaaattaataaaagaatagaagataattgtaaaattatgatgaagatataaattgttttagaattaaggaataggaaaaataatgtgagttgtagttaaagggattataaaaattaaaatggaaatatatttgattgtttattatgtggttagtgttacgaaaaattattatttaattttatatttaaaaataattttggtcgggcgcggtggtttaagtttgtaattttagtattttgggaggtcgaggagggtggattacgaggttaggagattgagattattttggttaatatggtgaaatttcgttttttttaaaaatatagaaaaattagtcgggtttggtcgtgggtgtttgtagttttagttatttgggaggttgaggtaggagaatggggtgaatttaggaggcggagtttgtagtgagtcgagattacgttattgtattttagtttgggcgatagagcgagatttcgttttaaaaataaataaataaataaaaattttgtgaggattacgttattattaaatgtatttgatagattataaaaaggtttatggttggtaaaaattgatttaagtagaatagattatgtttttatttagattttttgattttagagattgaaagtttggttattattagtgagtagtgattagattgtgtttgaattattgacggaatttttgatatttaaatgtattaggttgttttttgaagtgggagtagagatgtaagggttgttagttttaatgtataggtaaaatttttatttattttgtatttattattttaaaagttttatatgttttttttgggtatatgttgaagaatataaggaagtattaaattattttttgttttgaagtttgattagtaagttggtttggggttattaaataaaatataagtttttagttaaatttgaattttagatatatattataatttattggaaatttaaatttaagtgggtattttttggttttatttgttaaattttttaattttaattgggatatatgagtatggattatagggcgagttatgtaagttatagtgatagtgattttatatatttttattttttaattttttttttgtaaagaaagtgtttagataatttaagaataaaaagatagatatttttgatttagggtattttttttaaagggtaaaggaagttttatgaaggttatatttaaagtttggggatttgtttattttttgtaaattgttcgtatgagaatgttatttttttggtttttttttttttgaggggatttaattataaaatcgagagttttatttttggttaaggttggaaatttgatgtttgttagtattgttgggagtgggagattgagagaaatgagtttgttggggtatttaatgggaataaaatagttgtggttgtgatgtattattatagataattagtgtattagtggtatagaaattaagaaagaagatgttatgaaagataaatgatatgatttggtgattgattggtaaggtaaggaaattagtaaattttggttttttataagtttattttttggaaatatagtatgtattgagattagaattttataatatttttattttatgtaggattaagatttttaatagatattttttaaaataatttttagttgttttataattaatagtggtttgtttaatatagattttttttagatggtttatatttatggtttttatttagggatagttcgttaattttttttttttttttattatttttggggaatgtgtggtaatgtttggaggaatttttggttgttataatagggattttttttgatgtttaatgagtagatgttagggatatttttagagaatttgtaatgtatataatagtttttattattaataaattattatttggtttaaaatgttaatagtgtaggttgagagtattggtttatattgtgttttttttgaaaagtttagatttatatttgtttttttttttttgtgacggagttttattttgttatttaggttagaatgtagtggcgggattttggtttattgtaagttttatttttcgggtttatgttatttttttgttttagtttttcgagtagttgggattataggtgttcgttattacgtttgtttaattttttgtatttttagtagagatagggttgtattatgttagttaggatggtttcgattttttgatttcgtgattcgtttattttagttttttaaagtgttgggattataggtatgagttatcgtattcggtttgatttatattttttatatatttattatttaattatttttttatggttaatttttgtttgttttattagaaaaaattatagagttgtataaatttaattatttttttgttgaatttatttggtgtagagaatcggaggtcggagaatcgtgattaatttagtattttattgatgttatatgattaaatagtaaattgtttattaggaatatagaataggggtaaatttttttttttgttggtcgttagaagttttgttgagggtaattattttttggtattgggttttttgagtttatttattgggatatttagagtttattgttcgaggaatgtagttttgtaaggttgttttggagtaagtagtagattaataattattttttttttattatttttttttattttgttgagttttttttaataaagaaagtttaaagtttagggtttttgtttattaagagtaaggtgttttcgatttttttttttaaatgaatttttttgtttttatttttttcgttcgtttttttttgtttagtttaatagggtttatggtatagtgatatttaaatagcgatagggtaacgttatagtggttttataatatagggatacgaggatgtgaataaagaaggtttgttggagtagaggaattgaaattgataagacgtatggggatttcgggatgagtttgttggtagtagatataaggttagtgttttaaagaggtattgggagtaatataaggttagtgttttaaagaagtattgggaatagaaagttttttgaattagggtaatatggggtagaatttgtgtattgaagaaaaatattatgtgtagttgtttaaagttttgttgaaataatttggtgtttaggttagattttagatattaataaaaatgttgtaggaggttattacgtataatttatagtttttatagataggtatttttgatatggaaaattgggatagagtagaaggattaaaatgggtttattaaaaaggttttaaagttgattttttttttttttttatttggagtttagttcgtattgtttttttgttattattttttttttattttgttggatagtaggagtgatgttttgagtttaaaaatttgaaagaatttgttgtattatttatagttttaatttaaaataaaaaataggagagggaggaaaaaaattggtttatattgttttttttaatagtagaaatatttgtatcgtttttttcggtagtagaaatagagattttaatatagagtattttatattttgttgttatggttaaagagtttataggattttgtattttttttatttttgtaaggtttgatttaaataatttatagtagtttatttatgaatatattttattagagtttaagttgttgaaggaattaaaatgagtgtggtaaataatggtatatagagtttatttattttaggattgttagaatttgtatttggtgttgtgcgttttttattttttgatggaaagtatttagtttatgtttgtttgtttttttgtgtatatttgatattgaatttaaattggtaagaaatgtgtgtagataatgttagatagaatcgtgtagttggatatagagatattatagaggatatgttgttaggtaatggttttatttagatttggaatattaaatggtatttttaaatgttagtagtgtgtataggttgttaaatgcgatagggttataattttagaagagggagttttagtgtaattttttttatatattatgtaagtgttgtaggaattttgtgtataattttttgtatgatgataagatgtaatgaagtattagattttttatatcgatgttgtagaaatgttaattttaattttagtttttgagaatgtaaacgtagattgtaaacgtgtattggtatttgtgaggtgtataaaaaatttgggaaatttttttagagtttgttaggttgtgggaattgagttttattgttttataatattagcgtaggtaatggttaatttagtagttgataaatgtaaaaggagttaagggttaaattttaaaatgggaaaatgttataattgtggaaaaattggatattttaaaaaggaatgtcgttagattttaggatagaaaggaatttataatgtagtgttttatttagtagaaaaaatattaggattttgttttcgttgtaattaaggaagttattggggtaattagttatttaaaattttatgaaaatagtatttatttgtcgggaaattagaagggggtttgtacgcgtgttttttaaataacgagggtatttttagtttagattataggtttattttagggatgggttttaggagaaagattgatttttggtattttttattttaggaatattaggaagtgtaggattagatttttttattagagaaagaattatattagttggaggagataaatttattaaagtttttattggtatttgggggtttttattaataggatatataggattaattttaggtaaaagtttttttaatttgtaaggtatgattgtagtttttggagtagttgattttgattatgaaggagaaatttaagtagttttaatgttaaaatgtttttgggtttttgaattgggagaatatattgtttagttgttgtttatttttcgtaaattatatttttttttataaaaggagaaatgaggaaataaagggtttggaagtataattatatgggaaatttatttattttagtttatagtttttaatagatttatttgtgtagtataaattaaaagaaagaaattttatgggtttatggatataggagttgatgtggtagtaatatttagtaaggattggtttttagtatggttttttaaattaatttttatatttttagtgggagtaggagtggttaaaagtgtttaatagagtgttgagattttattttgttttggttcggatggatagttatgtattttttagttttatgttgtaaatatattaattaatttatgggatcgagatttatttatagtattgaatatgagatttataaatgaaaattttgataatttaggatttaaaatattgaaagatatgggatattagagtgggaaaggtttagggaaatttttacgaggaaaatttaatttaatattaataattggaaaaatagatagaaaagggttatgatattaggatttttgatggcggttattgatattttttttttattttttgttttattattagaatggttaatggtaaattcgtatgggtggattaatggtttttattttaggagaagttgatataattttagtagttagtataagaataagtggatataggatatatagaggagttagttagtttttagaatttattagtgtttgttattttaaaaaagtttggaagatggcgattgttgtatgatttgagagttattaatgtataaattaaattaatgggtttattatagtaaggtgtgttaattttagtggttatttttagagattggttttttgtagtaatagattttaaggattgtttttttattatattattatatgagaaggataagttttaatttgttttttttgtgttttttattaattaaagagaattttttttttgttattaatggagagttttattttaagatatgtttaatagttttacgttatgttagtattttgtaggataggtattaaaggagtttcgaaatatgttttttattgtttatattatttattttatggatgatatttttttggttgtttttatagattaaattttatattagttattttgagaaataaagtaggttttaattaaatggaatttaaaaatagttttagaaaaggtataaataatttcgttatatcgttatttagataatattgttattgaaagacgtgtacggttttaaaaagtagttttttttaaagataggttatagattttaaatgatttttaatagttgttaggggatattaattggttgtatttaatgttagatattgttatttattaattgatataatttttttaaattttataaggagattttttattagatttttcgtagtaattgattaaagaggtagaagttgagttatagtttgtggaatagatgttttagtaacggtatgttttttagttatagttatagaaatttttgtttttattattttttagataaaattgtgtagttttataaagtttatttttttattttttttgtgattatttattataagtttattttaggtggataaatttattttattgatggtttttttaaaggtggtatagttgtttatggatttaagtatatttaaataataatgatttttggggttttagtttaatatttagagttgattgtagttatataggttttatagtttatagttttagatgttattaatattgtttgtgatttagtttatgttgtaaatgtagttagttgtatagaaattgttataattaaaagtattttagaattagaattgtttaatttttttttaagattttaataaattattcggttttgtgtagtttttttttattttttttttatttgtttttatatataattttttggagttttatttttaggtaatgatagagtaaataaattgattggttttgtgttttagtaagtttaaattttttatgtattattgtattaaaatatttttgtttttatttgtacgtttagtttgttttatagttaagttaggtttataatatagtcgtgtttaatttgttagtatgtttttggagttatatttgtagaaggatgtaatttacgaggtttggttttaaatgaaatttggtaaatggatttatatatatagtagtttttggtaagtttagttatgtttatgtgtttatagatatttatttttatatgttgtatgttatatgttaaatagttgagatagttggttatgtgcggtaatatttttgttattatttgtttatatggggatatttaaataattaaaaattgataatggatttgtttatgttagttatgttttttaaaattttttgtagttttgggttataatttataaaataggaattttttataattttagaggataaggtattatagagtaggtatattaaatattataatatatgttgaaaagataaaacggaggagtaggagataagttattattgtaattaaagttatatttagttttatttattttaaattttttgatttttggtacggatgttaagattttagtggaaagatattggttatttttagagaaaaagagaagaggtttttcgaaagtgttatggaaatttttagaaaaaggatattggaaagatttggtggatttatcgtttgtagttttatttatttaggaggttgaggtaggagaattatttgaatttaggaggcgggggttgtagtgagttaagatggtattattgtattttagtttggttaatagagtgagattttattttaaaaaaaaaaaaaaaaaaaaaaaatatatatatatatatatatatatatatatatttggagaattatttttgtttgttttgtataggagatgtattgattagttaaatgtgaatgtaagaatttttaaaattaaaatgacgttttttaatttttaaatttttgttttaggatttaggtttttttacgaatataaagattcggagaattatttttgtttgtttcgtttttttaggggtagaattatttttttggtgttttaaggtgtgagtgtatggaggtattatttttaaaaatttatattcggtttttttatgtatttaattttgtgtttttatttatttatattgttttaagatatattttttttttaaggtgtaagaggatgataaataggtgttaagtggagtatttaagtgtgatgagtttttttataatggaatggagtgagaagttttttgattttataagttgaaggttatttttagttattgttttatatattttacgtaaattaatttttatataattttaagaggtaaattagtataatttaatttatattatacgtgagaaagttgagatataaaagaattaaaaaatttttttaggattaattattaaaaggtagattttggatttgaattaggtaatttggtttaggtattagttttaattaatatattttgtatttttaaagatttgtaaatatttaaataatgtatgataattttaagttatgaagaaataaataaaatttttataatatttcgtaaatttagtgggtttatattattacgattaaattttaggttgatgatattgtgagggtatatggttagttgtgttggaggtttggttaaggttagagtttgggtttatagagaagtaaataaatagttgaataacgagattttaattttttgatttattttttttatttgttttttttttagtttaatttaaggggattatgtattttgtaaagatttagtttttgttttatagtaattttttggtttgttgtgtgagtggtttttatttaggtagtattgaagttaggtggtttcggaatggttaggaagagaaggttgcggtggtttttataggtttgatttagaatggagattggattttttagattttggtgatgttggaaatagtttttcggagtggaggagtatttaagtatgacgagtttttttatagtgtaatggagtgagtagttttttgattttttaaattttttatttattaagaaggggattgtgttaatttttgagtgttaggtttttttttttttatattttatttgtatttgttttatgtttttatttttattagtataggttattgggggtagttttgtaatcgtttttagaaacgatttttagaaataggtttttagaaacgatttttagaaataggtttttagaaacgatttttagaaataggtttttagaaacgatttttagaaataggtttttagaaacgatttttagaaataggtttttagaaatttgtattttttggagaagtagttatatttgttacgtaggagaggttgttttttttttgaatttttatatgatagtataggttagggttacgcggtttttttgggttttgggtttttgggtttgagattgtgtttttggtgtttttgatttgagttgtttgttgtgatttgagaagaggagaattgtagcgatttttttgatatgaggggagtttaattttagttttgttttttattagttttgttattttagataaattatttaattttattgagatttaggttttttgttgattagattttgaagttgtgttttatattaaggttgtaatatttgaatgaggttgatgtttggattttgtaattgtttagtgtgatttgaaaaacgtttttttttttagaaatagttagttattttagtttttatagggtagtttttttttttattttgaaagttttgaattttagggttttaagtaaagaggtttaatttggaataaacgttattaaatttggtttttttttttaggagtacggtttgaatttgtatagagtaagatgttgagtggagtcgggggtttcgtgttgggtttgtttttttttgggacggggttgtttatttattttaagaattagaaaggtgaggagtttttgggagttgagtatttttataggtttttttggaggaggaaatatggttttgttaggattagtttttagtatattagtggttttggataaagtttttttttttttaaatgatttttaatgttttgataatttagaaattattagtgtatggttattatgttaaagtataatagtttgtggtttgtagagataagagaaaggttaataagtaggggttttttgtttcgagattttgaagtaaattaaggaagagttattaaggttaatgtaattatattggattttgtgatagatattttatgttttatgggttatatggtttgtttttgtttttttttgtcgtggttggtgggggttgtggtgttagagaaattttaggtgggagatttggggttgggatattgtattggaagatagatttgtttttatattttttaagtatatatattttttttttttttttaggatattttggattttatttaaaaggtaatattttttaatttttttttagaaagagattcggtttttttagaatgatggtagaggtgataaggcgtgagatagaaataataggaaagattttggatttagatttttgattaggtaatttatattaaaattttttttttttatttagaaaaggtttgtgttttgtaggattattggtttagggagatttaggaatttgttttttttttttttgtagtgtttttatttgagtcgttgaaagcggggaaaagaagttttagtaaagttaggtttgaaaataattttttttgttttcgtaggattcgagttgaagtgtagatgattatatttaaggaagaattttttgttttagttttgtaggatgaaaagtttttttatttggttgttatttttttataagagttttgttaggattaggttgttattggtttagtaattttgtagaaaatgtttttttttgtggttttcgtagtttttgtttttggtttgaagttttatagttttgatggtagcgttttatttttaatttttgtgtttttttttatttaaatttttttgttttttttgtatttgtattttttttgtgttataaatatattgtattattaaatgttttttaaatagagttaaaaattatttggtttatttggttgtaaggataaaaaataagagaaagggaagattattttttaatagaataatggtttttatgtatatataataagtatatgaggtaaatgtatatgttaaatagtttgatttagatattttatattataggtatatattaaaattttatgttttataatataaatataatatataatttttattttttaattaaaaaagtaaatttaatgtttaaaaaggtaatgtataaaaattgagaatagattataataattgaaataaatttgttaaatatgagatgagaaattagttagtaagttaattagaatttttttttaatttcgtttacgatattgtgaatttatatttttaaattagtatatagttttttattttagagattttagttatatagtattattaaaggatttgtatagattttagagaaaggtaaatttagaagatggagggttttttattgtgttttatttgagagttagtattaaatatgttaaatttgaaagtatataattaatttaaaagtttattttaaagtaataattatttgaatataatttattcgttagagataattgttattttatttttaattaaatttaaggtttattttatgtatattttgtttttagttatatgttattgtatatatatagtaatatatgtatgtatatattttataagaatataaattttataggaatatattaagttgataattatgtttattttgtttgattttagagttgttataaatatgttttgttttttaagttgaggaaatgatttgttttattttatatgagatttgtggtgtggaattttaaggtagtattaaaatgtgtgggatgaatatttgaatgaagatgttttttgttgtaaatagtaggaaattttatttagtgggttttttttttttttaatttattattttatattgtcgatatatttaagtttgggtattattagggttgtttaatttagtaggttagtgttattattagcgattttggaattttatagtttatttttttattatatatagtacgttagtttttttgagatggtaggaggatttttgtagtagttttagtttttttatttttttataatttttaaaggtaggaaaaggatatgatttttttttgtgtgtttttataagaatttattaaatagtttttagagtgtttttagtatttatttttttaaataatggaatgatcgtgggattatatgggtttagataagttaggatttaatttttgtagagtgggtttgatgtatatgggaagaaaaagagtaaaattatatatttttaaaaataaagaaatggtggatggagtaggagagattgatttttgggtagggtaatgaaagattgtggtattattaggttgttagtatttatagttaaattttacgtgaaggtttagagattttcgataggtatttttaatttagggtttttgggtttttttaaatatatatatatttattatatatatatttaaatatatatatattttaaaaatatataaatatatataatatatttatattgagtattaaatgttagttattaatttaattataataaaataaaaaagtaagtaaaaaggattgtttttagaatttaagtatgttgatatgttattttatgaggtaaatatattttttagggaaatttttgaaaaaaaagtagaaaaaggaatgattagttttgtaaggtgttgttttaaaatatattatatatttatttttaaaaaggtatttgttattgattttttttttattaaatattagtaaaatagagtttagaattagaaagagttgagatttagttttagtttttggtaaggtgtattttaaatttattttttttattaaatagattttggataaataaaaattgaaatataaagagaaaatataaaattaataagatagatgttatttatttatttattttttttttttgagatggggtttcgttttgttgtttaggttgaagtgtagtggtgtgttttttgtttcgtataattttcgattttttggtttaagcgatttttttgttttattttattgagtagttgcgattataggtgtatgttatcgtgtttggttaatttttacgtttttagtagagatagggttttattgtgttgggtaggttggtttcgaatttttgattttatgatttgtttgttttggttttttaaaatgttgggattataggcgtgagttatcgtgttcggttgatagatgttatttttaatagtattattaatattataattatgtttgaagataaatagattttttaaatttttatgtagtattggtgggagtgtataattttataaatatttggaaattggtaattttttagtaagtttaatatatatttattatatgatttagtaattttattttttggaatttatttaagagatataaaaatatatgtttttataaagatatgtgtttgagtgtttagaatagcgttagttatagtaggtttatattgaaaataatttaaatattttttaattagtaaatggataaataaaatggtattatatttatgtaaggtaatattatttaataataaaaggggataaaaatagatttatatggtaggggagatattatgaatatgagggtagtttttttaaggtaagttttaatttttgtattttagatgatgagatattatttaatggggataatgtacgtgattggggtgatggatattgtagaaatattgattttattattaagtaatttatgtaggtaataaaattatatttgtattttataaatttatataaatgaaagaagataatatgaataaaaaggaatgaaaagaaacgaaataaaattgatgatatatattataaaattggtaaattttaataatgttaattaagtgaaggaaattagatataaaagattatatgttgtatgattttatttatttaaaatatttagagaaggtaaattatagatataaatagtagattattgggtgtttaggatttggggtatcggcgggaattaattataaatagataaattttggatacgatagaaatgttataaaattggattattgtgataattgtataaatttattaatttattaaaattattaaattttatatagataatgagtaaattttgtagtatgtaaattatgttttagtaaatttgttaaaataatttttttttaaaaaaataagatattgttgttaggtgtgatggtttatatttgtaattttagaattttgggaggttaaggcgggtggattacgaggttaggatttgaagattagtttggttaagatggtgaaatttcgtttttattaaaaatataaaaatattagtagggtatggtggtaggtgtttgtaattttagttatttgggaggttgaggtagagaatggcgtgaagtcgggaggtggaggttgtagtgagttaagatcgcgttattgtattttagtttgggcgatagagtgagatttcgtttaaaaaataaataaataaataaataaaaatagggttgtgtatggtggtttaagtttgtagttttagtattttgagaggttgaggtgggtagattacgtggttaagagtttaagattagtttggttaaaatagtgaaattttgtttttattaaaaatataaaaattagtcggacgtggtggtgtatgtttgtaattttagttatttaagaggttgaggtaggagaatcgtttgtgagtaggagacggtggttgtggggagtcgaggttatattattgtattttagtttgggagatagagtaagattttgttttaaaaataaaaaataattataataaaaaaataaagaggtgaggaaattgataaaattatttttttggttttgttttttatttgtttatggtagaatattattgtgttagtttatttttatattgttaaaaagaaatatttgaggttgggtaatttataaagaaaagaggtttaattggtttagggttttgcgtgttgtataggaggtgtggtgttggtaattgtttttggtgagggtttttaggaagttaataattatgggggaaggaaaggggagtttgggtattatatggtgagagtaggagtatagagaaagtggggaagagtcgtatttttttaaataattagattttttgtgaattgagtgagaatttatgtattatagttaagatggtattaagttattaatgaaggatttgttttttattaaaatattttttattaggtttcgtttttaatattggaggttatgttttaatacgagatttggacgggataaatatttaaattatattaataatataattgttttaatgtatattgatttcgtatttagtaatattatttaaatttatttattaaaattatgagtttgtttattaattttattttttaagtagttgattatgttgagagtaaataatgattattttatttggatgtaattattattttttttatttattttttttgtcgtttttattgtttaatttttttagtattttagatatgaaggagatagttttaaatattttacggttgagattaatatgtgtaataaggttattattattttttagattgaagaaataattttttaatataagtttgtaaatagatttttaaaaaattaaggttaagtgttgaattttgttaaattatattttaagattttatttaggtggttgtatgtgtatttttttttttttagttaatgtagtgaattatattaatggatttttaaatgtttaaataattttgtatttttggaataaattttatttggttataatgtagtagttattttttatattaatgaatttagttggttattatttttttaagaatttggtttataagaattattggtttataaatttttatttgttgtagagttttttttagattttgaagtaaattttatatagattttattaaatttaattgtaagtgttttttatttttttaaatgtttgaagtttgtataaagttagtgttgtttgttttttaaatattttaaaatatttattgaagttaaatgaatttggggttttgttttgggaaagttttatagaattggttttttttatgagatgtggaattttttatattttatgttatttgttagttttagtatattgtatattttgagtaatttatttattgtatgtaaatttgtttttgtaaaattatttataatatttagtattattttatgttgataaatttgtaagattataaaaaaagatatgaaatttgtgtttttagagttttagagaaagatgataaatgggtgatgtttaaagagtttttgaaggaagattgattattttttaaatttggataaagattttaaagtaaaaatttaagaatttgtgtaaatttaaaggaagataaatttaaagaaatttatgttaaaaaattttgaaagtaataagagagaaatgatattttatgtataggaggaaataaattaaatgatagtgtattttttattagaaattatgtagattagagagaagtgttataagatattttaatggttgaaagtaatgttaatttagaatgtgtatttagaaaaatattattataaaatgaaggttttattatgatatttttttttttttttttttttttttttgttttttagatggagttttgttttgttatttaggttggagggaagtggtatatttatggtttattgtagtttttgttttttaggtttatatgatttttatatttttgttttttgagtagttggaattatagatatatattattaagtttggttaattttttgtatttttggtagagatagggttttgttatgatgtttaagttggttttaaatttttgagtttaggggatgtatttgtttcggttttttaaagtgttgggattataggtgtgagttattgcgttcggttatgatatttttagaggaaggaaaattaagagaatttgatgttagtagatttattttaaaataagggtaaaggaagtgtttgaattggaatagaaatggtaagggaagaaattttggataattaggaaaaaaagaaattagaatgagtaaagatatgggttaatataatagattttttttttttagttttataaattagtttgatggttgaggtaaaaattacgatattgttagatttgggttttgatgtaagtagagaaaataaaaaatatatattataaatgtaggagtgaaagggataaaaaggtaaagtttttatattgtagttaaattgaaaaaattttagtataagtagattgtaagttacgttaatagatagataaaatataaaaattttataatgtgatatattaaaaagtgattgattaaaaaatggaattttaaatattgtttaagggatatatcgaaaaatagggaaagaaaatagagaagtaaaaattagaagaaataaaaattaaatggtagttatgagattttatatattaataattgtatgatatgtaaattgtttaaaaagataaatgttagagtgaaatataatgattcgttgatatgttatttatgagaaatttattataaatattataagagtggaagtttgaaatagaagaatggaaaaaaaaaatcgtatttatttttgttaaagaaagtagaaatggttataatattagataatataaaatgtatagagtaaagaatattttgagagataaatagaaatattatataattataaaaatgttaatttagaaagaagatatagtaattttaaaagtatgtatattatataattaagttatttataagtagagtaaaaaatggttagaattggaaggagaaatagataaatatatagttaaattttgggattttataaattaattttgaaaagttaataaaataattggataaaaatttagtaagataatgaaatttaataaaattatttattaataagatttaatggatattggtagattattatattagatagaagaatatatattttttaattgtttatggaatatttattaatattttttatattttggattataaaaggaattttaataaatgtaaagaattgaaattatatagattgtgttttttggaagtaacggagttgaattagaaattagtaatatgaagaaaattagtataattttaaatatatggaaatttagtaatatatatttaaattatttttggattaaaaaatgttttggttaggtgtggtggtttacgtttgtaattttagtattttgggaggttgaggcgggtggattacgaggttagttgttcgagagtagttagattaatatggtgaaatttttagttttattaaaaatataaaaaaaattagttgggcgtagtggtatttgtttataattttagttatttaggaggttgaggtacgagaatggttggaatacgggaaggttgaagttgtagttaggggagattgcgttattgtattttagtatggattatagagcgagattttatttaaaaaaaaaaagggtttggcgaggtggtttatgtttgtaattttagaattttgggaggtagaggtgggtggattacgaagttaagagatcgaggttattttggttaatatgttgaaatttcgtttttattaaaaatataaaaaattagttaggtgtggtggcgggcgtttgtagtattagttattcgggaggttgaggtaggagaattatttgaattcgggaggtagagtttgtagtgagtcgataaggcgttattgtattttagttggagacgtcgtatggcggtttacgtttgtaattttagtattttgggaggttgaggtaggtggattacgaggttaggagatcgagattattttggttaatacggtgaaattttatttttattaaaattataaaaaattagtcgggcgtggtggcgggcgtttgtagttttagttattcgggaggcggagtttgtagtgagttgagattacgttattgtattttagtttgggagatagtgcgagattttattttaaaaaaaaaaagatgttttaagaaaataaaaagtatgtttaattaagtgataatgaaaatataatatattaaaatgtttggtatatagttaaaggagtaatttgaattattatgtatagtataaaatgtatatattgaaaaagagaaaattttagaaattaataattttagtttttattttaaaaatttggaaaattgttaaaaataatttaaagtaagaagaagaaggagaaaaaaaaaattgatataaaggtagaattcggtggtttacgtttgtaattttagtattttgtaaggttgaagcgggcggattatttgaggtcgggagtttaagtttgattaatatggagaaattttgtttttgttaaaaatataaaattagttgagtatggtggcgtagttttgtaattttagttattcgtgaggttgagggaggagaattatttgaatttgggaggcgggggttgtagtgagtttagatggcgttattgtattttattttgggtaataagagtaaaatttcgttttaaaaaaaaaaaaaaaaaagaggtagagataaaattagtggaaaaaaagtttgtttttagaaaatattaatagaattgataaatttttaggataaaataaaaggaaaaaggagaaaaaatattaatattggggttgaaatatattatattattatagatttttcgatattaatagtatattaaaggaatatattaaaaatatttaggtgaaatggaaaagaattttttaaaagtatagaagtatatattattataattaatttaatatgaaatagataaattgaaaagttttgtaattataaaaagaattgaatttataggagaaatttttagtttagaatagttttataggagaaatttattaaatattttagtagaattaatataattttgtaaaattttttttagaaaatagaagagaggggaagatattttaatttattttatgaggttagtattttttaaaataaaaagtatataaaaatagtatagtaaaagaaaattaaaaagtaatatatttgtatgattatatatgtaaaattttttaataaaatgttagtaagtaaaaaatttgttaaattaaaaatatatgtaaagtatgttaagtagcgtttattttagggacgtaagtttggtttatgtttgaaattaattagtgttattttttttattaagaagttaaagaagaaatatcgtatggttatattaattgatatagaaaaggtttttgatataatttaatattaatttatgatttaaaaaaattttttaaaatagtaggaattgaggatgatttttttaattggataaataatttttataaaaacgttgcggttaaattatatttaatagtgaaagtttgagtgtttttttttttttgttttagttattaaggaaattcgtaaggttatagaatttaagattaataaaaaaaattaattttatttgaatatatagtaataaagaaattaaaataaatattaaaaatataatatgaattatttttatttaaaaaattttataagtatattaatagaatatgtatataatttatatgttgaaatgttgataaataaaaaaatttgaagaaatgaagagatttattgtgtttataaattagaaaattaaatatagtaaagatgttaattttttttaatttgatatcgaggtttaatataatttttttttaaattttagtaagatttgtaatagttgtagataaagttattataaaatgtatatggagaattaagggaattagtataggtaaaaaaaaattttatagggaaagagatgaaataattattattaaattttagaatttttatagttatagtaattaatattgatcgatattagtgtagggatagatatagattggtggagtagtatagagaatttagaaatatatatatgcgaatttattttgataaaggtgtaaaataatttaatggaggtaatataggttatagtttttttaaataatggtttaggagaaagtggaaatttatagataaaaataaaattaaataaaaaataaaatagaagtaagaaagaaataataaatttttatatcgtatgaaaatatttattttaatgaaattatgtttatatgtaaaacgtttagaagaaaatacgagaaaattattagaatttagggtttgttgtttgaattttgagtttttagatatgatattaaaagtattacgtgtaaaaaataaaaagataaaaataaataaataaaaaaaataataaataaggtttttttagagtttaaaatttttgttttgtaaagtattttgttaagaaatgaaaagtaagttagagatacggagaaaatatttaaaatatatatattattaagaatatattgtcgaaaatatataattaattataaaagtttttttataaaatatatagtagagtgtagattataatatttaattgtggttaggtatagtggtttacgtttgtaattttagtattttgggaggtcgaggtgggcggattacgaggttaggagatcgagattattttggttaatacggtgaaatttcgtttttattaataatataaaaaaaaaattagtcgggtattttggtgagtgtttgtagttttagttatttaggaggttgagataggagaatggcgtgaatttaggaggtagagtttgtagtgagttaagatcgtgttattgtattttagtttgggtaatagagtaagattttattttaaaaataaaaaaaatttaattataaaatgggtaaaagatatgaagagatattttattaaagaggatatatgtatatggtaaataagtataatgaatgatatgtaaattattagttattagggaaatgtaaattaagaatttgatttaatagtattatataatttttaatatagttaaaatttttaaaaaatatgataatggtaaatgttgttgagaatgtagaaaaattgaattttttatatattgatggtgagaatgtaaaatgggattatttttttgtgtttggaatttatttttttcggtgggtttttggttttgttgatttttagaatgaagttacggattttcgcggtgaatgttatagtttttaaagatggtgtgttcggagtttttttttttagatgtttagatgtgtttagagtttttttttttcggtggatttgtggtttcgttgattttaggagtgaagtcgtagattttcgtagtgagcgttataatttttaaagtggtacgttcggagttgttagtttttttcgatgggtttgtggtttcgttgattttaggaatgaagttatagattttcgtagtgagtattatagtttataaaggtagttcggatttaaagagtgagtagtagtaagatttattgtgaagagtaaaagaataaagtttttatagtttggaaggggatttgagcggttgttattgttggtttggggggttagcgtttatttttttatttggttttgtttatattttgttgattggtttattttatagagtattgattggttaattttatagtgtgttgatggattttttttatagagcgttgattggtgtgtttataattttttagttagatacggagtgttgattggtgtgtttttatatagtgttgattggtgtatttatagttttttagttagatatagagtgttgattgatgtatttataattttttagttaaatagaaaagttttttaagtttttatttgatttagaagtttagcggtttttaatttttaatttttattttaaataggatattttaacggttgttgggtattgggcgatgatttttttagttattttttgttggataggggtgaagaaggggttttgtagttgtagtgttttttagaagggaattttttaggttagtgaaagggttagtggtttagtttaggggtttttggtagaagttgttagttgagtttatttggggtttttttgtaagattatttgtagtttgatggtttcgattttagaggaaataaatttgataaggaggttaaaaatatagggtttgaaggcgagtaatagtaagatggttgttataggatttagaaaggggagaagttatgttgtttaattttagaggttggtataagagttttaaaggtattgtttgattttataagattttttttgtaaatattgggtggtattttgtattatttttgattggttagtgtaaaaataatattttttttttaagaaagcgtagagttttttttttttagtagtgaagaggtttaggtttcggtggttttgaagagttattgttgttaaagagtttatttgggagtattgtagagtaaggatagatttcgttattttttgtaaattgtttgagaaattttttgagagtgtgtggtagtaggataatgaagtagataaattggttattttggtttttttagtagtagttatttttaattttataagtaggggtattagttgtatggttttgtgttgatgaatttgagttttgaggggtattgatagggtttgattttttggggtaatgttaatgttgggttttagaaagattaaggtgtagatgtttgtttagatattggggaggtagatataggttgatattttatataagaagaatatattttggttggatagatagaattggttgtgtatgtggaaatgtgtgtgagtttgttgtttttatttttttatatttttagagtatttgttaatgtagtttcggtgagtggttggaaaggggtgttgggagtaaattgagtggttttttgtgttttatttttttattggagaaaaaaagttttgtatttattaggaattatttgagagagtgattgaaagaggggatgagaaggtatttattagtgttgggggtttttagtttgatttggattaggcgggtattttttgtttttttgaattgtttttttagtgtttagattttagggttgattttttttttaagtaggaggttataaatgcgtaatttgttttttatatttatgtagataatggttttagttttggttaatatgtttttttttaaaatggtatgggatttttaggtataataagaaaggtatgtgaaaagagtaaagttttttaattataattaaggaggtgggagaaatattttattataggttattttaggatttttcggatggtagatagttgtttaggattagagattaatattgagaaagttgtgttagtgtttaggaggaagttaattttatggtttttaatggttaaatatattcggggtttagtgagggtgatgatatgagttggtatttgttttaggtatttttagttttattgttggattatttggttgggggtttttggtttagagaatttttgttttttggggtagtgtattttttagtgattgttttagtatagtggatatgggtaagggggtcgtttgttttttattggataattttttttaaagtgtttttgtaaattatattgataataagttttattgggtgattagtttgttttattttttgttttttttgaattattaagttttatttgtttgagggttatgattaaggttgtggtttttttttgattttatttttttttttgggtttgttttttttggtttttattatagaatatcgaggttgttaggtttaataatgtttttagattttatttagggtttagggttcgttttttggagtttttttttgatatttgtggttgattgggtaataaatttatgttttaggattaattgattttttagtgaattgagttgggtgataggggagtatatttttttaagtttttttatagttgtttaaggaaaggagaaggattttttttttttttttgagttatggtagatattattgaataatttatggatttttttttaattttttttagtttttttagaatataggttagtagatgtttatgattttagtttttatgatttgagttaaggttttagtggggatttatattggggatggtttgttaattggtagggaatttgtttttttttttagttgttattttattatttatttaattaagatattaggtatttttaaatttttgggttgtagttaaagttttattttttttattaaaggtcggggtttgatttaataatagtatgatatttttttaagtgagatcgaacgtttgttttagattttgtaggatatttatgtatttattaggattatttgaaaattttttaggtttgttttgttttgatttgttttaaattagagagtgagaaggggatatgtatttgggttgggttaaatttttttttttttatagtttgaaggggatataattttatattataaggtattttattttatttgtttttttttttatagaaaaggttaagttgtaggatagtattgtgatttatattttttttaggtggttatttttttttattagagagtgaatattggggttaagttgtagtgtagaaaaaaatgagttattttttttttagggttagtgggttaaattggttttaatggtttaggatgtattttaagggtgagtatgttggtgtttgagtgttttttatttgaaagataaaattatttatggttttggtttgtttgttttttttttttgtttaagaatttgtaatggtttttggaattattgatcggaatagttgtatttattaatgtaggagtagaaatattttttgtttaagattttgtagcggtttttggattttgttgattggaatagttgtatttattaacgtagtagtagaaatattagttttttttttagattataaggaggattgaggaaggttagatttagtggtttttatagacgtattttcgaaaaattttatttttgtttgtttttttagattataaagaggattaagaaaaataggatttagtggtttttattgatgtattgatcgaaaatttgttagagttttaagtatttttttgttaatattgagattttatttttgttttataaagatgttatgttttaaaaatgaaatggagggttatattttgagggagagaagagatttttagggttggaagagtgatgttttttgtttttattcgaatataaaggatattatttttgaagttttttatattttagttttaggaatagtttttgttaagtttgttagtttgaggaagaattttaaaaggatagttggtttttttatttaatgaggttttgggtaaaaattatgtttttttgattggtgagtttgagtgtttaaagaagggaatagagttttggagtttgtattagaaataatttttataggagaaattagaaattttagaaatagggagtggtttttagaagtaggatttattttagagaagagaggtaagaggaagtttgttcgataggtattaggatttttgggtaagggttaggatagataggatagataggcgagttttatttaggtaagtaattttgagagttttgtttatggttgtagcgtcgattaatttgttgttgggatttttgagttgaatggtttttttttttgttgatttttggtttagtttagaagtataggaaaagtagaagttggttttatgtaaattaatgtttttaattttaaatagttaagggttgttagagagtttttttttagaaagtttgatattcgtgtttttagtttagtggttatattagttatttttaattggttaataggtgtttggtatttagtttttaaattttaaggaaaaatagggtagaatagtaagtgaaaggggtttgaaggtatttatagtttggcgataggtgattgttttatgtggggtgttaaaatgtgtttttttgtggtcgttaaaatgtgttttatttgggttgttaaatgtgtttagaatttattttttttcgtgggtttttggttttgttgattttaagaatgaagttatagattttcgtagtgagtgttatagtttttaaagatggtgtgttcggagttttttttttttaatgtttagatgtgtttggagttttttttttttgatgggtttatggtttcgttgattttaggaatgaagttgtagatttttgtggtgtatgttatagtttataaaggtagtgtagatttaaatagcgagtagtagtaagatttattatgaagagtaaaagaataaagtttttatagcgtagaaggcgatttaagttagatgttggtgttggttcgagtggttagtttttatttttttatttggttttatttatattttgttgattggtttattttatagagagttgattggtttattttatagagtgttgattggtgcgtttttatagagtgttgattggtgtgtttataattttttagttagatataaaagttttttaagtttttatttaatttagaagtttagttggttttattttttatttttagaaagttgtttggtagtgttttgaagaattatatatatatttgttatatgagttaggaataatattttgagatatttatattagagaaataaaaatatatatttatataaaaattttatataaatgtttataatagttttatttgtaataattttaaaattagaaatagttaaatgttttttaataggtaaatagttaaattgtagtgtatttatttgatggagtattttttagtaataaaaaaaaaaaattgttgatatatgtaataatttggatggattttaaggatattatgttgtggggaaaatgttagttataaaagttatatattgtgtgattttatttatgtaatatttttaaagtgacgttattatagagattggtggagaagagattagtagttgttagggtgatgatgtgtagggattagtgtgtgattttaaaaagtaatatgaggggagatttttgtgggatggaatagttttttattggattgcgtggtggatatataaatttgtaaatatgataagatataggtatagaattatgaatatatattatatcgaagttagttttttggttttgttattgtgttagagttgtttaatataaatatttggaaaagtttcgtgaaagggtatgtatacgttttttgtattgtttttgttaattttttgtgaatttataatgatttttaagtaaaaatttttaaaaagtttttttttttttggttaaaatttaaaatttttataaaattaaatgttggtaaggatatagaataatggggattttgatttattgttgttgggaatgtaaaatagtatagttattttggaagatattcgttgttttttataaagttaaatatatatttattatataataatttttatgtttatttaaataattatttatgggattattgtattggttttattttaatggtaaatatatgatattatgtatttattagaatttatagaattgtgtaatagagtgaattttaatataattatgaattttagttaataataagtattagtattggtttattaatattagtgtgttatattaatgtaggatgttaataatagaagaaattgaatagagggttgttttagggaaggaggtatgtgggaattttttaaatttttttgaaagttttttgtatatttgaaattgttttaaaaatggttttgttatatgggaggatatggatttatttttgttttttattttatatttgtttgagtttgagtgtatgaagggatgggttgtttttttatatttgtgggcgttttttattaggtagaacgagagatttggaaaagaaagagatatagagataaagtatagagaaagaaaaatgggtttaggggatcggcgtttagtatacggaggatttacgtcggtacgggtttttgagtttttttagtatttattgattattatcgggcgtttttcggagagggggatatggtaggataataggataatagtggagagaagattagtaggtaaatatatgaataaatgtttttgtattataaataaggtaaagaaaaaagtgttgtgtttttgatgtgtatatatataaatattttaatgttttaaagagtagtattgttgttagtatgttttatttttagttttatggcggtttttttttattttagtagacggaatatataatcgggttttatattgagatattttattgtttagggacgagtaggagatagatgttttttttttattttaattgtaaagaggagttttttttttttttattaattttttttagtatagattttttacgggtgttaggttgggggacggttaggtttttttttttttacgaggttatattttagattattatatggggagaaattttggataatatttggtttttttaggtagaggtttttgcggttttttgtagtgttttgtgtttttgggtatttgagattagggagtggtgatgatttttaataagtatgttgtttttaagtatttgtttaataaggtatattttgtatagtttttaatttatttaattttgagttgatatagtatatgttttagggagtatagggttgggggtagggttatagattaatagtattttaaggtagaagaattttttttagtacggaataatatggagttttttatgtttatttttttttatatagatatagtaataatttgattttttttttttttttttataattgtgttttttattgtttatttatttattttatattaaaattatagatatgttagtaaatatttattttatttgtaatatttttaagagtttgttttttttaaattattggtaaagaaattcgttatttatttattaagttttataaggttatgttattttggtttgtgtttattttgtttttttaggatttttatcgttaggttgtagaaattttgaggaaaataatttcgtaattaattagagatcgaaatgaagttataaagttatatttttatgtaaatatttgattggttgtaaaaaataattaattagaggtattttgaattttatatttattacgtagaaaatggggggcgggttataaagggagtagtttttgatttttttgttatttaggtataggaagtttgagttttttttttagtttagttttattcggatgttaatatgaaacggttttaggttttttgtttttagattttgtttttttggtttgtttggaagatattttggttgttttttttaaagttaaatatattttattataagatttagtaattgtaattttaaatatttgtttaaataagtggaaaatttttgtttatataaaaaagtgtatattaatgtttatagtagttttatttataattgttaaaaatttaaagtaattaagatgttttttagtaagtgagtggataaattgtggtagatttatattatgggttgttatttaatattaaagaggaataagttattaagttaggaaaagatatggagaaaatttatatgtatattgttatgtgaagaagttagtttgaaaaaattatatattatatgattataattatataatattttggaaaaggtataaatatagtgatagtaaatagtggtttttagggatttaggaggaagaggagtgtatgagtaggtggagtttgggataattttaggtgagcgaaattattttataggataattttgttattgaaatattagaggtttagtttaagttttgtatataagggttttagtttgggttttgttgtttattatatagaaagttaattattgagatgataatgagtgttgttaaagaagaaggttttaatttttaattaggtggtgtagttgaggagatgggagattagtgttaaatttatttttgtgattgattaaaattgggagtttatttagtagggaaaaatttatttatgtatgagaaaataggaattagggaggggtaagggagtaattataatgaatggggaatttggagttttattgattagatgagacgatttggtgagttttagttttttgatattttttgagaggtttgggagaatatttttttggaaaggaatttaaataaaataaatgtaagttttaagttttaagattagaagtgtttatttttatgtttatttaaaaaaaaaaaaaattgtttatgggatttttgggttagttttattaaatggtggatatatgatataatatatttattagaatttatagaattgtataataagaatgatttttaattttattatggattttagttaataataagtattagtattgttttattagtggtaataagtatattatatcgatgtaggatgttaagaataggagaaattaagtagaaggttgttttagggaagaagggttttatgaattttttttttttttttttttttttttttgagacggagtttcgttttgtcgtttaggttggagtgtagtggcgggatttcggtttattgtaagtttcgtttttcgggtttacgttatttttttgttttagttttttaagtagttgggattataggcgttcgttattacgttcggttaattttttgtatttttagtagagacggggttttatcgttttagtcgggatggtttcgattttttgatttcgtgattcgttcgtttcggttttttaaagtgttgggattataggcgtgagttatcgcgtttagttttttatgaattttttttgtaatttttttgtttatttaaaattatttttaaaaaatggttttgttatatggaatgatatggatttatttttgtttttttattttatgtttgtttgtatttgattatattttttattgtttatttataatttgtttgtgttatagtttttttagttttattattaggtagattttaggtttttgttttgcgtttaggaagaatgaggtatttagataagtaaagggttagtaggataaagaggagttttattaagtaatagaatagtttagagagttatagtgggtagtttttttttattgttaggttgtttcgatatttgtttagttattaatagagagggtggtttttttttgtagttgattgttttgttttttttttagtttttagtagagaggagattttggtgagggtagttttattttgtagttgagaggagattttggggagggtaatttttttttttagtaatttattttttatgtttttggtttttttttttgttttttttattttttgtttaattttgtttgagtttagggtttttataggttttagaggggagaaagtgggtattatggttggttatggggtaggtttagaaaatgtataagtttttattcgtgttagtaggattggtagtttagtttatagtttttagattttttttggttagaaggaggggttttattggggatttgtttttttttgtttaggagattgtttgttttttagcgttatttatggtatttaggttgtttatggtaaggggtttgtaggttagtattagttgtttttagtttatttttttttagttttttcgtggttgaggtggtaggaggttggtgtgttaattttgttttgagtatgtatacgtttagttaggttgtaatagtattggggtttggttttaattttattttgagattagagtaggtattcgggagtttggagaggttaggtgagaggttaggtagtgggagtagatatttgtaagtttgtagggataggaggtgttttacgtttttgatagcgtggagtgtagagaggtttggattttgttgtatggagggtaggatttttatttaatttttggagtttgtaggtagtttttgttatatttttttatagtttggggtgggtagttttttttatttgtttttatgttagtatttggggtaaggatgatgtgtttgtaagttttttttttagtatttagaggtgttcggggttttttttgtttggatggggtggtggagtagattatatttaagtttggtcgtcgggaaaattaagtttggtggttattttagggatatcgttttgggttattttaggtagaatttttttttgaggcgtaggaattgggtttttttagtagggtgggtgggatagtgattatgtcgttggttgggtttttaaagcgaggttatttttattttttaaattaggtttaataagtttggttttagttttatgttttttttatagttgtagggtgagagtagtaaagtaggagtgggaggtttttggtttgggggcggtttcgttagttgtttaagggttggggtattatagttagttgttttagggacgtgaggtataggggatatgaggtataggggttttattatggttattgttttcgtagtcgtttttgttattatcgtttgtaattttttattgtagtcggttattttggatagtttattattgttagtattattatttttttattttaaaatattaagttgaattttagttagattttttagattattattattttaattagtttttttttttatagtttgtttttttttttttttttttttttttttttttttttttttttttttttttttttttttttttttttttttttttttttttttttatagggtttgttatttgttatttaggttggaatgtagtggtatgattttggattattgtagcgtggattttttaggtttaagtaatttatttatttttcgagtagttgggattaaattagtttttaagtaaattattattttttgttgattaaattaaatgtgatattttggttgtaattttataaatttttatagtattgaattattattgtggtatagagatatagtttatttttaaatttagggatagtagtgatttttttttatgaaattttgaattttttatattaatagaagtatgtttttttaaagtaagtgaggtatttttttttttttgttttgagatgattaaatttattattttatgatgagaaatttgtaataataattttgagtaatagtttatatttgggaattttgaggttattgttatttttaataagaaggagattttttaggagttatgggtgttattatataagataaatgtaaatgttgttatttttagaggagggtaaggatgataatgaggtgatttttttgaaggaattagaattgttatatagtattttttttaaatcgtatattgttgttatttattaatataagtagttatattgttatgtgtatttataaattataggaatataaataattttaatatataggatattatttttagaaataggatgtgaaggattatgatatagtggttgagtttgagggatatataatttggtttaatttatagtgtattatttattagttttgtatttttgtaaaagttgttttatttttattgttttattttttttatttgtaagtatgaaaagggtatttattttagtgagttgatgtgagaatgaaataaaaatatgaagtataaaaagtatttagtgtaattttgagtataaagtaaaatgtttatttttacggtagtatgatgagaattttgtttttggaaatattaaggtttataaggaatgagtgtttatgtggtagtatgtgaattaatgtagaacgttataagtatagttgtattttgaagtttattttgaattttagatgttatatttatattaataaaaagtataataattatttaaatgtatataatatgtttaatattatatggttatattaattgatgtaatttatagttttttttagtgtttttttttttgaatatttaaaaatgtattagttagtaaagtcgttttatatttttttttatgataaaataagagaaatataatagtaaagtgttatagttttaattaaatgaggaaattataatgggaattaggaatgagggattgaatattttttatataaaatatttattattttaaaatagaattgtgattaggtatgatggtttacgttagtaattttagtagtttggggttatattgttggtgtagaatacgaagttaggagatcgagattattttggttaatacggtgaaattttatttttattaaaaatataaaaaattagttaagcgtggaggtacgtgtttgtagttagagttattcgggaggttgtggtaggagaattgtttgaatcgaggaggcggaggttgtagtgagttaagattatgttattgtattttagttagggtaatagagtaaggttttgttttaaaaaagaagaagaaaaaaaagagttgttttgtgaacggttgattttgagagtttttgatcgattttttagatttacgaatatttggattgtatatttgattttattatattgttagggtaagtgtcgtataaaggtatttttagattttttattgtatataggtggtttttgttagtttatttttgtgtgtgttttggaggtgtcgttaaatttgggggtagtattaggagatacgtttgaaaaagatatttttatttagattaaattattaatagatttttaattttttttaatttattaaagatattattatttggaaataggtatatattatattttttagttaatagttgttattttgttatattattagatatttggggttgtcgttttttgaggtatttagagaattatagaattttttagtattgaaagatttgaaagatcgtagtgtttttattttaattgtgagatatgaagtaatttttttaaatttgtgatattaagatatggtataataaagataagattaaaggatttcggatttataattatgtttttttcgttttttttatttttaaatatatttatatatttatttttgtaaatagttgttttgttaagtgggaaatgaatgtttttataaggtttaaatttgtgaatatattattgattagtatagagttggtttataatagttttttaattaaagtgttttatatgtaattggtttaaattttttaagtattaaattaaaataattttttaaagaatgaaattattttagaagaggatttttatatagtatttttgagtagtaattgatgatgttgttgaatttagatgttgattggtttttcgatacgagattatttaatttaggagtaaggaaattagtaattttttttttataatttggaatgtgggtggaggggggttatagttttttttgagtgagatttgtttgtttttttggtttttggttttgtttttttttttagtatggtgtgtttgaagttttttggaggttttagtttggtagcgttgatagtgatattgatggtgttgagttttcgattggttttcgttggggatattcgacgtaagagtatattgagggtgttgagttattatggggtgggggaatatagggagttgtgttaatattgtgtttaggttatgttttttaagaaattgtgaggttttttttagagattgtttatttttattaagggatcgtaaattattttttttataaaaggaatttggttatttgttttttttatgagatttgtgtaaggggtttttgtataggttatttttttttaaatttttattaataaaatttttgtattatatgtatttagggtttttagaggatttggaaataaggatgttaaaataaattttttatatagtaattttttttattatgttgatttatgttagataaaaggaggtttttattgaaaattttgtgggagttaagggaatttaaagggttttttttagacgattttgggttatgttttttataggatttgtggtgttggttttttttttttatatgtgaggatggatttagtggtttttttagtatttttttttttttttttttgaattttaatgtttataaagtttgtatttttgtagtgtatgtaggttgtttgatagaagttatatttagtgtttttttttttttatggggaaaaatttttggaattgaagttgagattattagtatttggaattattttatagatatagagtatttatgaggtattttttggtgtttaaagaatttaaggtattttttgaaaaattggtttaggttagtgtttattatgaatttttttaatttttttatatttgttttttttatattttttatatgttttaattagatatgatagaagagatttaattaatgtagtataaattatatgaaattttatttttgtaagttaaaaataattaaatattagaaatttaataatgtttaaattatatattgtgtggggttatcgagataatgtggatattgtttatattttatagggttgaaagttaatgggtaagttttggaaatttattgttttattgcggttttgtttttagttttataggtttatttattatgtttttagttttttttaattagttatgtttgtttattttttttttttatttttttttatttttttttaattatgttgttattatttttagaaatttttaaagtttgtatagatttttagtattatgagatttattgaaagagataatatttttttttttgagatagggtttgtttttgttatttaggttgtagtttagtggtgcgatcgaggtttattgtaatttttgttttttatatttaagtaattttttttttttaggttttagagtagttgggaatataggtaggtaattacgtttagttaatttttgtaattttggtagagaggagattttgttatattgtttaggttggttttaaattgttgaatttaagtaatttttttgttttagttttttaatatgttaggattatagatgtgagttagtgtgtttaggtaaaagagatgatttttaataaaaagatttttttttttttaaattattgtttttttatttatgaattttttttttaattagaagaaggagaaagaagtttgtttgtattttttattaggaggagaaggggtttagtgtgatattaaaatgaaagagtgttggaatttgagtttttttttgttttttaggatttttatagtgattagtttttatattttggtttatttgtgtaaattatatttattttttttagtagttattgtgtattgggttttattttaggtttaaattattttatttgattaagatagagagggttttaatttttaaggaagttataagagtggaggagatagatattaatttaataagtatttaataaagaagataatgttagagagttatagtgtattgaagaaaagatattagatgtgtgttgaaagagagaaatggatttatttattttagtttgtatgtttagggagttttatttgagaaagtgatatttagttgagataataaaataagtagatagttatgaagatttaacggacgaaagttttagggagatcgaatcgagggaaagtattggtgtgggaaattatgtggagggagagaaagaaggttagaagggttgacgtatagaaagtaaggaaatggagaggtagaagatgaggtaggatatagagaggaagttaggagttttattattataggttttgatgtttacggtaaaaaatttgaattttattttatttttatttatttttaaattttatttatttatttattttgagatggagttttatttttgttgtttaggttggagtgttatggtataatttttatttattgtaatttttattttttgggtttaagtgatttttttgttttagttttttaagtaattgggattataggtatttattattatatttggttaatttttttgtatttttagtatatatggggtattattatgttgattaggttggttttgaatttttgattttagataatttgtttgttttggttttttaaagtgttgggattataggcgtgagttattattttcggattgaattttatttaaatagatatgagaagttgttgtatggttataaggagagttaatttatatttaatttttgtgtgtgtgtgtgatggagttttattttgttgtttaggttagattgtagtggtataatttcggtttattgtaattttcgttttttgggtttaagaaattatttttttttagttttttgagtagttgggattataggtgtatgttattatagtcggttattttttgtatttttagtagggatggggttttatcgtgttagttaagatggtttcgattttttgattttgtgatttattcgtttcggttttttaaagtgttgggattataggtatgagttattgcgtttagtttatatttaattattataattaattttagttattttgtggggattggattgttggggtttataagtggttaggaggattatttaggagtatagtagggaattttttagggaaaataggtttgtggttttatggagtgtattagtgataaagacggtgaaaaagataaagtggataggtttggtatgtatttttgtttagtttgttaatgaattattgtaaagggggtggaataattaagtttatttttgaggattttgttttgataaataagtgggtggtagttttgtttattgagataggaaaaattgtgggaggaaatgatttgaagtgggtggttggaaataaaagttttgtttaaattagagatgatttattgatatttatgtagagtaattagaaggttagtggtatttaagagatttatggtgaggtgaggttagggcgttagatatttatgttggcggtattaatacgtgtagtgtgttaaattttagggagtggaagaggatatatagggagatggattgtgtggagaaaaaagaagagggtataggttagtaaagtgggttgagatagagtttagggatgttggagaaaaattaagagaatataatgcgtgtaagttaaggaaaatatattttttttagggagaagggagaggttaattgtggtgagtattattaagtagagggggaagtgagaacgtgatagagaagtaagtgttgggtttggtggagttgatatttgtagttaatggagtatttagggaggaaattggattggattatttgaagagtgagtagaagtgaggacgaggttaaggttgattgttttgagtagaatttcgggaaggattgtgttttgggtttagggagttcgttgaatttaaaggaaaaggttaaagaagttaaagagacggaggaagatttgtgaataagagatgtttagttattagtaaggaaatattggagagtttttgtgtgtagtggtgattatttatgtaaaaggttatatagttaatatttaatatagttagtattttatagagttaatatttattagtgatatagaatatattagttattattttaggttatgagagtggtgataaataaaatgaattcgttcgttattagtatatgttatgtaatagtttgtagtgattgtgtattaggtttgtgaatttttgtatgtaattttaataatgattttgttgtatttgtggtatttaaaaatatatatatttttggaatttaaaattgagaggttataagtaaaatttagtattagaaatttagtgttggaaattagattgtagtttaaatttgagtatatagaaagttttttttttttatgttagtagatgttttttatgtgaggtttaggtatattatattattagatataaattagtgtttttgttttatgtttttagaatgataattttttatgaaatttatagaagaatagaagataattgtaaaattatgaagatattaattgttttagaattaaggaatataaaaaataatgtgagttatagttatagggattataaaagttaaaatgggaatgtatttgagtgtttattatgtgattagtgttaagaagagttattatttaattttatatttaatagtaattttgtgaggattatgttattattaaatgtatttgatatattataaaaaggtttacggttggtaaaaattgatttaagtagaagaggttatttttttatttagattttttgattgtagggtttgagagtttttttattattagtgagtagtgattatattgtgtttgaattattgatagaatttttgatatttatatatattaggttgtttttttgagtggggatagagatgtaagggttgttaattttaatgtataggagaaatttttaatgattttgtatttattattttaaaagtttagtatgtttataatggttatgcgttgataaatataaggaagtattaaattatttttttttttgaggtttgattagtaaattgggtaagagttattaaataaaatatatgtttttagttaaatttaaattttagatatacgattataatttattggaaatttaaatttaattgggtattttttggttttatttgttaaatttgttaattttaagtgggatatatggatatggattatagtgttatttatgtaagttatagtgatagtaattttatatatgtttatattttaattttttttttgtaagaaagtgtttagataatttagggataaaaagatagatattgtttgatttagggtggatatttttttgttatcgtttttaaagggtaaagggagatttttgtaggttttgtttatagtttggggatttgtttatgttttgaaattgtttgtattagaatgttatttttttggtttttttttttttgaggggatttgattataaaattaagagttttgtttttggttaaggttggaaatgtgatgtttgttagtattgttgggagtgggagattgagagaaatgagttagttggggtatttaatgggaataaaatagttgtggttgtgatttattattatagataattagtggattagtggcggagaaattaagaaaaaagatgatgtgaatgataaatgatatgattagtgattgtttggtaaggtaaggaaattattaaattttggtttttattaagtttattttttgaaaagatagtattgtattgggattagaattttataaaatattttttttatttaggattaagatttttaagaaatattttttaatataatttttagttgttttataattaatagtagtttgtttaatatagatttttttagatggtttatatttgtagtttttatttagggatagtttattatttttttttttttttttattatttttggggaatagtgataatgtttggaataatttttggttgttataataggggttttttttgatatttaatgagtagaagttaggaatattgttagagaatttataatgtttagaatagttttcgttattaataaagaattatttggtttaaaatgttaatagtgttgaggttgagagtattggtttacgttgtgttttttttgaaaattttatatttatatttgttatatatttattatatagttgttttttatagtttatttttgtttgttttattataaaaaaattagatagttgtataaatttaattatttttttgttgaatttatttagttaatgtaagtttaatatttttatatttagtttttgttttatgtaatattttttaatatttttatgagttgttggttattattatttttattaatttttaataatttgtttttgtaagttataaatagtgatgttgttgaaattattttttagtaatatgttttagatttttgtagtgattttatatttgatattatttataatgtaaaatgtttttatgtatttattttatttttatttaaggattatttttaagttatttttgtcgtttttatattttaaatataaagataaaaatattaaaaatatatattgtgttttatatatgtgtttatttttatatatatatgtatgtatgtttatatgtatggaaattatagaagtatatgtcgttaataagagttttgagatatttttgattatttatttttattagatgcgatttgttaaatgagttgtggaaataagttttttaaattgaatttttgagttttgtgaatttagaaatgtaaaggaaagtttgtggatatttatagggattatggttttattgttttttaaatttttcgatattttattattgttttattataaatttaaaattttaacgttatttacgaggtttttaatatttggttttttgtgatttttttaggttaattttttattttttttttttttagtttttttgttttagtgaatttttttttagttttttgaagaagtttattaatttaagtttttgtatatgggattttttaaatttgaaatgtgtttttcgttttgtttaaatagatacgggttttattttgttttttggtttatatttgtttaatttgttaagttatatttgaattgttattttttagagggtttttttttggtattttaatgtaattgagattattttattattttttgttttagaattttttattttcgggattttttatttttgtttaattttttgtgtgtttggtttttggttatcgtttttattgttttttaagtttttttagcggagtggagaggtttgtttttttttgtttggatttttagaggtagcgtaggtttggtataaggttattattaagaaagtgtttataggatgaacgcggtgggtgttgtttaaggaatcggtaaatatgtgggatgagagaaggagtagagtgtttttggggtggaggtttttaggaggaggcggggcgggttgcggtgcggggcggatttttttttagtttttgtttggaggtttttagaataagttggaggtagggagggggttttaaaagtttggggatgagaaggggttttttcgtatagttttttaggttttcgttcgtttgaggaaaacggaggatgagtttttgggttgtaggtggtgggcgttgcgggtggggtcggttaaggtttttagtgttcgtattttatttagggagtttcggatggcggcgtcgttgttagtgtttttttaggaggtcgttcgtgtgatcggatttttcgtgtattcgtagtacgttttttggagttgcgtaagtttgagtgttatttttttaatgggacggagcgggtgcggtatttggatagatatttttataattaggaggagtttttgcgtttcgatagcgacgtgggggagtatcgggcggtgacggagttggggcggtttgtcgtcgagttttggaatagttagaaggattttttggagtagaagcggggtcgggtggataattattgtagatataattacggggttggtgagagttttatagtgtagcggcgaggtgagtatgtcggggggcggggtttgggtttttgtgagttggaaatttgagagagagtgtgtgtgtgtgtgtgtgtgtgtgtgtgagagagagagagagagaggaagagatagagagagggagcgcgttatttgtgagtatttagaatttttttaatttcgagtaagtagttatgaaggtataggtgtgtgtgtagagtgtggattggtttgtgtttgtgtgtttgttgtgggaggggaagtaggagggggttgttttttatttttggagatttttgtggagaggtgataagggaggtgggtgcgggcggttggagagagaggagattttgattgttttgggtttttagagatgtagggaaggaaagtgtaaggtgtgtgtgggtggggtgaaggtttaggggaggagagttgaggggtaaggaaggtttgggataatgtgaggaggtcggttttagattgtttttggtatatattttttatgtaatttttgaaataaaagtgcgtgttgtttgtaaaagtattagattaagttttaggggaattgagtagatttttaaggtatttttgaaatttttttaggtataaattttttgttagttttttgtttttttagtgtgtatatttttatatagtagaaatgatagtgaaattaatttttgaattaaagttttaatatagttattgtattattataatgttaatagttttttagtagttatatattatttttttatatataatagttgtgatataatttagggattatttttttttttgttgatttttattatgatatttattaaaagttgaaaatgtatgtttttggttaatttttaatttatatttttttatttgaaaaaatgtggagaggtttgttttttatttaaaagagtttttttgaattattttgatcgatttattggttaattttaataattgttttaagaattttttattttatttggtaggtaatggataatgatttattgtttaatatttttagggtttagtattttttttagtgattttgtgggttttttgtattgtaagattattaatattttattgatatttgatttagtatttgttttagtttgtggtttgtatgttgattttgaaaatttttttttatgttaagaatttgaatatttttatttaataaaatgtattgtaaaaattttattaatgatttataatttattttaaatttgttattttgtggtatttttgtttttaggtttttttttatttttaaaaatattgtatttattgagagtatgttaatgtcggggatttttttgggtataagtattataagtaatgagttttagattttgttttaatttaaatgtgattttggaaagaaaaattattttataattggtttgataataattttgtttgtgttgtacgggggatatattgagtagttgaatgaaaatataagaatttttaaaattaaaatgacgtttttaaatttttttgtttgttttaggatttatgtttttttaggaacgtaaaaatttggagaattatttttgtttgttttatttttttaggggtagaattatttttgtggtgttttaaggtgtgagtgtatggtagtagtatttttaaaaatttatattcggtttttttatgtatttaattttgtttttttgtttatgtatattgttttaaattatatttttttgttacggtgtataaggatgataaataggtgttaagtggagtatttaagtgtgatgagtttttttacggtggaatggagtgagaagttttttgattttataaattgaaggttatttttagttattatgtattttatataaattaatttttatataattttaagaggtaaattagtataattattttttattgggggtgataaagttgagatatagaagaattaatttttttaggattaattagtaaaaggtagattttggatttgaattatgtaatttggtttaggtattagttttaattattatattttgtatttttaaaaatttgtaaatattttgataatgtatgttaattttaagttatgaagaagtaaacgtaattttttatattttttaaatttaatgggtttttattattaagattaaattttaggttgatgatattgtaaggttatatggttagttgtgttggaggtttggttaaggttagagtttgggtttgtagagaagtagataaatagttaaattagtagaattattttgtttttttgatttattttttttattttttttttttttagtttatttttaggtgattgtgtattttgtaaagatttagtttttgtagtattataattttttggtttgttttgtgagtggtttttatttaggtagtattgaagttaggtggtttcggaacggttaggaagagaaggttggggtggtgtttacgggtttgatttagaatggagattggattttttagattttggtgatgttagaaatagtttttcggagtggagaggtttatatttgttaagtggagtatttaagcgtaacgagcgtttttatagtggaatggagtgagtagttttttgattttatatattttttatttattaagaaggggattgtgttaatttttgagtgttaggtttttttttttttacgttttatttttatttgttttatgtttttatttttattagtataggttattggggatagttttgtaatagtgtgtagaaatatttgtattttttgtggaattagttatgttttttttttttttgaatttttttatgatgttataggttagggttattcgatttttttaagttttaggttttgtttttgggtttgagattgagtttttggtgttgttgttttgagttatttgttttgatttgggaagaggggaagtataggggtttatttgatatgaggggagtttaattttagttttgttttttattagttttgttattttagataaattatttagttttattgagttttaggttttttgtggattagatgttgaacgtttgttttatattaaggttgtaatatttgaatgagtttgatgtcggaattttgtaattgtttagtgtgatttgaaatttttttttttttttaaaatggttagttattttagtttttgtggggtagtttttttttttatttttaaagttttgaattttagagttttaattaaagaggtttaatttggaataagtattattaaatttggtttttttttttaggagtacggtttgaatttgtatagagtaagatgttgagtggagtcgggggttttgtgttgggtttgtttttttttggggtcgggttgtttatttattttaggaattagaaaggtgaggagtttttggtagttgggtttttttataggtttttttgtaggaggaaatagagttttgttgaggttagtttttagtatatgagtggttttgaataaagtttttttttttttaaacggttttaatgttttgttaatttagaaattattagtgtatggttattatgtgaaagtataatagtttgtggtttgtagagataagaggaaggttaataagtaggggttttttggtttgagattttggagtaaattaaggaagagttattaaagttaatggaattatattggattttgtgatagatattttatgttttatgggttatatggtttgtttttgtttttttttgttttggttggtgtgggttttggtgttagaatttttcggtgggagatttgggattgtgatattgtgttggaggatagatttgttttaatattttttaagtgtatattttttttttttttttttaggatattttggattttagttaataggtaatattttttaatttttttttagatatagatttagtttttttagtgagaggtgaagttagttggatttttgggttgggtggggatttggagaatttttttgttttataagaggtttttaaatgtattaatgagtgttttgtaaaaatatattaatgagtgttttgtaaaaattgatattttgtggttcgttagatgtttgtaagatggattaattagtattttgtaaaatggattaatttatattttgtaaaatggattaattagtattttttaaaatggattaattagtaggatacgggcggggataaataagggaataaaagttggttattttagttagtatttgtaatttgtttaggtttttttttatgttgtggaagttttgtttttttgatttttataataaattttgtgtttattttttgggttcgtgttatttttaagagttataatatttattgtaagggtttgtggttttatttttgaagttagttagattttgaatttatcggaaggaataaatttaggatatattagaatgatggtagaggtgataaggtatgagatagaaataataggaaagattttggatttaaatttttgattaggtaatttatattaaaattttttttttttatttagaaaaggtttgtgttttgtaggattattggttttgggagatttaggaatttgttttttttttttttgtagtgtttttatttgagttttttaaagagggggaaagaaacgttagtagagttaggttgaaaataatatttttttttgttttttgtaggatttttgagttgaagtgtagatgataatttaaggaagaattttttgttttagttttgtaggatgaaaagttttttcgtttggttgttatttttttacgagagagggtttttttaggatttagttgttattggtttagtaattgtagaaaatgtttttttttgtggtttttttagtttttgtttttggtttgaagttttagtattgatggtagcgttttatttttaatttttgtgtttttttttgtttaaattttatggttttttgtgtatttgtatttattttgtattataaatatattatattattaaatgttttttaaagatggagttaaatattatttggtttatttggttttaaagataaaaaatgaaaagaaaagaaaagaaaaagggaagattattttttaatagaataatgatttttacgtgtgtgttatgagtatgtgaggtaatgtatatgttaaatattatgatttagttattttatattataggtatataataaaattttatgtttttatataaatatgttatataatttttatttgttaattaaaaaagtaatgttaatatttaaaaaggtagtgtataaaaattgagaatagattataataattgaaataaatttggtaaattagatgagaaattagttagtaagttaattagaagtttttattttatttataatattttgtatttataattgtaaattagtgtatagtgttttattttagagattttaataatatagtgttattaaaggatttgtatagattttagagaaagatatatttagaagacggagaatggagtttttattatgttttatttgagagttagtatgaaatgttaaatataaaagtatataatttagaggtttattttaaagtaataattatttgagtataatttttttattgatagagacgattgttattttatttttaattaaaagtttttatgtatattttatttttagttatatgttatttgtatataagtagtagtataagtatatataaattttgtaagagtataaattttatagaaatatattaagttgataattatgtttgttttgtttgattatagagatgtaataaagagattttattttttaagttgaggaaatgatttttttattttatatgagattcgtggtgtggaattataaggtagaattaaaatgtgtggaatgaatattttaatgaagatgttttttgttgttaataataggaaattatatttagtgggttttatttttttttaatttattattttatatagttgatagatttaagattgggcgtttttagggttgtttaatttagtaggttagtggtattattagtaattttggaattttatagtttatttttttattatatatagtattttagtttttttgagatggtagggtgatttttgtagtagttttaggtttgttatttatttataataatttttaaaggtaggaaaaggatattttttttttttgtgtgtttttagaaggagtaattaaattgtttttagattgtttttagtatttatttttttatgtattggaacgattgtgggattatacgggtttagataagttaggatgtaatttttgtagagtcggtttgatgtatatgggaagaaaaggagtaaaattaaatatttttaaaaataaagaaatggtggttggagtagtagaaattgattttagggtagggaaatgatagattgtggtattattaggtcgtaagtatttgagttaatttttatacgaaggtttatagatttttgataggtatttttaatttagggttttgggtttttatatatatatatatatgtgtgtgtgtatatatatatatatatatatgtgtatatatatatatatttgtgtgtgtatatatgtgtgtgtgtatatatatatatatatatatatatatatgtaaatatatatgtgtgtatatatatgtatatatatatatatatatatatatatatatatatatatatatagagagagttattaaatgttagttattaatttaattataatagaataaaaaagtaagtaaataggattgtttttagaatttaattaagtattttgatatgttattttatgaggtaaatgtattttttagggaaattattgaaaaaaagtagaataaggaatgaatagttttgtaaggtattaaaatatattatatatttatttttagaaatgtatttgttattgatttttttaattaaatatgttaataaaatagagtttataattagaaatagaaagagttgagatttagttttagtttttgtaagttgtattttaaatttattttttttattaaatagattttggataaataaaatttgaaatataaagagaaaatataaaattattaagatagatgttatttttaatattgttattattattataattatgtttgaagataaatagattttttaaatttttatgcgttgttggtgggagtatatgagtttataaatatttgataatttggtaattttttaaatagtttaatatatgtttgttttatgatttagtaattttattttttggaatttatttaagagatataaaaacgtatgtttttataaagatatatgttagggtttagaatagttttagttatagtaggttaaaattgaaaataatttaaatattttttaattagtaaatagataaataaaatttaattatatttaggtaaggtaatgttatttaataataaaagggggtaaaattagatttatttggtagcggagatattatgaatattacggtagtttttttaaagtaagtttttatttttgtatttcggatgatgagatattatttaatggatataatgtatgtgatttgagtgatggatattgtggaaatatcgattttattattatgtaatttatgtaggtattaaaattatatttgtattttataaatttatatatatgaaaaaagataaaaagaaatgaaaatataaaatgatgatatatattataaaatttgtgaattttaataatgttagttaagtgaaagaaattggatacgaaagattatatgttatatgattttatttatttgaaatatttagaaaaggtaaatttatagatataaaagtagattattgggtgtttagggtttggggttttagtgggatttaattataaatagagaaatttgggatatgatagaaatgttttaaaaatggattgttgtgataattgtataaatttattaatttatttaaattatttaattttatatatatagtgagtgaattttgtagtattttaaatcgtagttgtgatataatgagtgaattttgtagtatgtaaattatgttttagtaagcgtgttaaaataatttttttttaaaaaataagattttgtaagtaagataaaatttaaaagatataaatgaaaaaatatttgaagaagattattgatttatttgtatgaagaaaataataaaattaaaagaagtatatgacgtttaggaaaaatttgattatgtaaggtagataatgggttaatttttttagaaaaattgttaattaattaataaataaatttatggaaatgttatagataattgggtaaaggatatagatttattatagaagagaatattttaatagtcgataaatataaatatttgtttaaacgtattaatgaatagaaaaatttaaatttaaatagtagtgtaataaattattttttttattttataattgataagtataatagtttgttttaaaattaagattttaagggaatagatttttttatattattaggattttgagttatggtagtgtagtagtgtttattaaaatttaaaatatagttattatatgttgatgaaaataataaaaattttattttaatattcgttttaaagaataattttatatgagtttaaggagatataaaattggtagtttgttgagttacggtttggaataataaaaatatttttagatttaaaaagaaaaattgattaatttgttttgattataaaaattttgtatattttaaaaattatgtagtatgcgaagtgatagtatattgtaggatgatatttggtgttgtatggggtacggtgagtatatattggtgtaattttgtgagtagtttggataatatagtatttttattttaggttgttatagttttagtaaatttttttttatatatttatgatgatataaaaaaaatgtaataggggagaaaagaaatattttttatatttagatataagaaaggtaaattgtggtatagttatataaaggaaaaatatttagggttttaagtaaattatgtaggattattaatatagattggaaaaaatattaaattataatgtagtgaggaggtggaaaattataagaattgttattgttattataagagtaaaaagatatatagattaaattaaatggataaattggaaaataattttatttttaaaattttaattagtcgtggattaaaaagtataaaaattttaaattttagagatgaataaattttatttaggtgagtagggataagtgtttatttttattttttggtttatttattgaattttaatatgggtggaagattaagtttggttgagaaagggagattgtgagagagtaaggataaattagttgagttgtaaatagtttcgtgggtttgtgtgatgtattataatttatagagggtttttgaataatatatatttattttattttgttagttgattttttttttagaattttttttgattttatgttggttgtgtgggaattagggacgtagatagaagataataaatatttttttagttttatgtaaagattaggaaggaaattaagataggaataatatttttaattattttgatttagttggtatttataattgatataaattgataatatttgataattataaaatatttatttatttgtattgtataaagataatttatgaaatagaataaatattatgattatagaattagatttagtatttttataagaataaaattatatagagtatattttttgaatataattttattaaattataaattagtaagattgagaaaattgtttaaatttttggaattaaaataatatatttttaaataatttatggtttgttaaagaggaaattagaaggaaattagaaaataattttaaataaaataatattaaaatgaattttaaaaattttcgagatgtaattaaggtagtttttagagaaaaatatttagttttaaatgtttgtattataaaaggataaatatgtaaaaattaaaggtgtaaatttttaataataaaaagaagtaaatttaagttgaaaaaagtagaagaaaaaagtaaagaggtgaggaagttgataaaattatttttttggttttgttttttatttgtttatgatagagtataattatgttagtttatttttatattgttagaaagaaatatttggagttgggtaatttataaagaaaagaggttttattggtttagggttttgtaggttgtataggaggtgtggtgttggtaattgtttttggtgagggttttaggaaattaataattatgggggaaggaaaggggagtttgggtattatatggtgagagtaggagtatagcgaaagtgggggaaaattaaggttaagtgttgaattttgttaaatcgtattttatgattttatttagttggttgtatgtgtatttttttttttttagttaatgttatgaattatattaattgatttttaaatgtttaaataattttatatttttggaataatttttatttggttatgatgtagtagttatatattattgaatttatttggttaatatttttttaagaatttggtttataagagttattggttttttaatttttattcgttgtagagattcgtttaagttttgaagtaaagtttatatagattttattaaacgtaattgtaagtgttttttttttttttaaatatgtttgaagtttgtataaagttaatgttgtttgttttttaaatatttttaagtagttattgaagttagatgaatttggggttttgttttgggaaagttttatagaatggatttattttttttatgagatgtggaaatttttttattttatgatatttgttagttttagtatattgtatattttgaataatttatttattatatgtatagtatattgtatattttgaattatttattatatgtatatttattttgtaaagttttttataatatttagtatgattttatattgataaatttgtaagattataataaaaggtatgaaatttgtgttattggagttttagagggaaatgataaatgggtgatgtttaaagagtgtttgaaggaagattgattattttttaaatttggataaaggtttaaatgtaaaaatttaagaatttgtgtaaatttaaatgaaaataaatttaaagaaatttatgttaaaaaaaatttcgaaagtaataagagagaaaggatattttatgtatagaagaaaataaattaaatgatagtggattgtttattagaaattaggtagattagatagaagtggtataagatattttaatggttgaaaggaatgttaatttagaatgtatatttagtaaaaatattattataaaatgttttattatgattttttttttttttttatttttttttttttgtttgttttttgttttttagatggagttttgatttatttaaaaaaaaaaatttaggttagagtgtagtggcgcgattatggtttattgtagtttttgttttttaggtttatgtgatttttatattttagttttttgagtagttggaattatagatatatattattacgtttggttaattttttgtatttttggtagagatagggttttgttatgttgtttaggtttgtttcggatttttgagtttatgggattcgtttgttttggttttttaaagtgttgggattataggcgtgagttattgcgtttggttatgatatatttaaaggaaggaaaattaagagaattttatgttaggagatttatgttaaaataagggttaaaggaagtgttttaattggaatagaaatgataatggaagaaattttggataattgggaaaaaagtaaatagtaaatgagtaaaaatatggttagatataatagatttttttagttttgtaaattaatttgatggttgaggtaaaaattataatattgatagatgtggttttgatgtaagtagagaaaataaaatatatatattatatatgtagaagtggaaagggatataaaggaggtaaagtttttatattttagttaaattggtaaaatgttagtattagtagattatgataagttatgttaatagatagataaattataaaaattatataatgagatatattaaaaaaagattgatttaaaaatggaattttaaaaattgtttaaggaatatattggaaaataggaaagaaattagagaagaaaaatttaaaggaaataaaaaagaaaataaaaagtagatggtagttataagagtttatatattaataattgtattatatgtaaagtgtgtaaaaagataaatgttagagtgaaaagtaatgattttttaatatgttttttataagaaatttattttaaatattatatgtttatttttttttggtttttttgtgattgaggtggtaaaaggttggtgtgttaatatttttttgagcgtgtatatatttagttagtttgtgatagtattggggttttgttttaattttattttgagattagagtgggtatttgggattcgggtgaggttaagggaggggttagaaagtgggaatagatatttttaagtttgtatggataggagggtttttttagttttgagggagtggagtgtagagaggtttggattttattgtttgcggggagggtcgggagggtggggtttttaatttatttcgtggagtttgtaggtatttttcgttatattttttggtagtttggggtgggtagtttttttcgttgggcgtaggttagtatgtggggtaagggtgatgtttttgtaagttattttgttagtatttagggtgttcggggttttttttcgtttggatggggcgggggaggtattttggggaatagattatagttcgggtttggttgttaggagtattaggttgggtggttattcgcggggataaaattttggacggttttaagtagagtttttttttgaggcgtaggaattgggcgtttttggtagggcgggatagcggttttgtcgttggtcgggtttttaaagtgaggttatttttacgttttatttcgggttattgaagggtggttttagttttatgttttttttataattgtagggcgagagtagtaacgtaggagtggtgaaggttttgggtttgggggcggttttgttggttgtttaagagtggggttagtgtagttagttgttttagtgacgcgaggtataggggatatggggtataagggttttattacggttattatttttttagtggtttttgtcgttatcgtttgtaatttttcgtagtagtcggttattttggatagttcgttatcgttagtattattatttttttattttgaaatattaatatgaattttagttggattttttggattattattattataattagttttttttttttataaatttgtttttttttttttttgtttttgtttttttttttttttttgaaggagtatgatttaatggttgagtttgagaggtatataatttggtttaatttatagtgtattgtttattagtgtattttggtaaaatttgttttatttttatcgttttagtttttttatttgtaagtatgaaaacggtgtttattttattgagttgatgtgagaattaaataaaaatatgaagtatataaagtttttagtataattttgagtataaagttaaatgtttatttttattgtagtatggtgagaattttgtttttggaaatattaaggtatataaggaaggagtgtttattttaattgtggtatagtgtgaattaatgtagagttttatatgtatagttgtattttgaagtttattttgaattttagatgttatatttatattaatataaagtataataattatttaaatgtagaattatatgtttaaaattatatgattatattagttgatgtaatttatagtttttttttagggtttttttttttgaatattttgtaatatattagttagtatagtttttttatatttttttttatgataaattaaaagaagtataatagtaaagggttataattttaattaaatgaggaaattttaattggaattaggatgagggattgaatattttttatataaaatattaattattttatagtagtgttgttttgttaatagttgattttgagtttttgattaattttttagatttttgaatatttcgattgtttagttgattttattatattgttagggtaagtgttatataaaggtatttttagattttttattgtatataggtggtttttgtaagtttttttttgtgtgtgttttggaggtgttattaaatttgggggtagtattaggagatatatttgaaaataattttttattgagattaaattattaataaattttttattttttttaatttattaaagatatttttatttggaaataggtatagaatattttttttagttaatagttgttattttgttatattattagatatataggggttgttgttatttgaggcgtttatagaattatagtattttttagtattgaaagatttgaaagatcgtagtgttttcgtattaattgtgagatatgaagtaatttttttaaatttatgatattaagatatggtgtaataaggattagattataggttttcggatttataattatgttttttttattttttttatttttaaatatatttatatatttatttttgtaaatagttgttttgttaagtgggaaatgaatgtttttataaggtttaaatttgtgaatatattattgattagtatagagttggttaataataaggatttagttaaagtgttttttatgtaattggttttaattttttaagtattaaattaaaataattatttaaagaaggaaattgttttagaagaggatttttatattgtatttttgattagtaattgatgatgttattgaatttagatgttgattggttttttaatacgagattacgtaatttaggagtaaagaaattagtattttattttttgtgttggggatgtgagtagagggaggttatagtttttcgtgaatgtgagatttgtttgttattttggtatttggttttgttttgttttttagtatggtgtgtttgaggttttttggaggtttttgtatggtagcgttgatagtgatattgatggtgttgagttttttattggttttggttggggatattcgatttaagtgtatattgcggttgttgagttattataaggggggtaaagtagggatttaaatttgttattgtgtttagtttatgttttttaagaatttgtaacgttttttatagggattgtttatttttattatatggattttaaattattttttttataaaaggagtttggttatttgttttttttatgagatttgtttaagggtttttatataggttatttttttttaaatttttattaataaaattttgtattatatgtttttagggtttttagaggatttagaaataaggatgttaaaataaattttttatatagtatttttttttattatgttgatttaagttagataaaaggaggtttttttttgaaaattttgtgagagttaagggaatttaaagggttttttttagatgattttgtgttatgttttttataggatttgtggtgttggttttttttttttataagtgaagatgtatttagtggtttttttattatttattttcgtttttttttgaagtttagtttttataaagtttgtatttttgtagtttatgtaggttttttgataaaagttatatttagtgtttttttttttttatggggaaaaattcgtggagttgaagttaagatttttagtatttggtattattttatagataaagaatatttatggggtgttttttggtgtttaaagaatttaaggtattttttgaaaatttggtttaggttagtgtttattatgaattttttttaatttttttatattagttttttttatattttttatatgttttaattagattttataagaagagatttaatgaatgtaggataaattatatgaaattatatttttgtaagttaaaaatagtgaaatattagaaatttgttaaggtttaaattatatattttgagtggagttatcgagataatgtggatattgtttatattttatagggttgaaagttaatgagtaagttttgggaatttattgttttattcgggttttgttttaaattttataggtttatttattatgtcgttagttttttttaattagttatgtttatttatttttttttttagtttttttttatttttttttagttatgttgttattatttttcgaaatttttaaagtttgtatagatttagagtattatgaggtttattataagagataattttttttttttttgagatagggtttggttttgttatttaggttgtagtgtagtggtatgatagaggtttattgtaatttttgtcgttaaagtttaagtgattttttttttttagtttttagagtagttgggattataggtaggaaattatatttagttaattattgtaattttggtagagattgtattttgttatattgtttaggttggttttatatttttgggtttaagcgatttttttgttttttaatatgttaggattatagatgagagttaatatgtttagtcggaaagagatgaattttaatttaaaaaaaaattttttttttttaaaattattgtttttttggttaggtttagtggtttatgtttgtaattttagtattttgggatgttgaaatgggtagattatgaggttaggaaattaagattattttggttaatatggtgaaattcgtttttattaaaaataaaaaaattagttgggtatggtagtatatgtttgtaattttagttatttaggaggttgaggtaggagaattatttgaattcgggaagcggaggttgtagtgagtttagattacgttattgtattttagtttggcgatagagttagattttattttaaaaataaaaaaaaaagagaaaaaaaattattgtttttttatttgtgaatttatttaattagaaggaggagaaagtagtcgtgtgtttgtattttttatagggaagagaaggggtttagtatgatattaaaatgaaagagtgttggagtttgagtttttttttgttttttaggatttaaatagtgattagtttttagaattttggtttattaatataaattatatttatttttattagtagttattgtgtattgggtttttttttaggtttaaattattttatttgagtgagatatagtggattggtttttatttatggaatttacgtaattatagaggagatagataataatttaataattatttaataaagaagaaaattttagatagttatcgtgtacggaagaaaagatattaggtttgtggaaagagagaattggatttatttaattttggtttatatgtttaggtagttttatttgagaaagtgatatttagttgagataataaaataagtagatatttatgaggatttaagggataaaagttttagggagataaaatgtgggggaaattttggtgtgggaaattatgtgtagggatagaaagaaggttagaggggttgatttataggaagtaagaaaatggagaggtagaagatgaggtaggatgtagagaggaagttaggagttttattatattaggttttgatgtttttagtaagaaattttaattttatttaaatagatatgggaagttattgtatggttataaggagagtttatttatatttaatttttaaaattaattttagttattttgtggggattgaatcgttggggtttataagtggttaggaagattatttaggagtatagtagggaatttttagggaaaataggtttatggttttttggtgtgtattagtgataaagatagtgaaaaagatgaagtggatagattcggtatgtaatttgtttagtttgttaatggattattgtaaaggggatagaataattaagtttatttttaaggattttgttttgataaataagcggatggtggtgttgtttattgagatagggaaaattgtgggaggaaattatttgaagtgggtggttggaaatgatttattgacgtttatgtggaataattagaaggttaatggaatttaagagatttacggtgagtttagggttggaagtatttatgttgatggtattaatacgtgtattttgttaaattttagggagtggaagaggatatatagggtaatagtttgtgtgtagaaaaaagaagaaggtataggttagtaaaggggatagagagggagttttagggatgtaggagaaaaattaagagaatataatgtttgtaagttaaggaaaatagattttttttaagaagcggggagaagttaatgagtattattaagtgggtgaagtgagaatgtgagagagaagtaagtgttgggtttgttggagttggtatttgtagttaatggagtatttaggatggaaaatggattggattatttgaagagtaaatagaagtgaggatgaggttaaggttgattgttttgagtagagagttttagggaaggattgcgttttgggtttaggaagttagttgaatttaaaggaaaaggttaaagaggttgaagagaagtaggaggatttgtgaattagagatgtttagttattattagtaaggaaatacgagagggtttttgtgtgtagtggtgaatgtttatgtaaaatattatatagttaatattttatataatttatatttattagtgatttagaatatgttagttattgttttaagttatgagaatggagtgatgaataaaatgaatttggtttttattagtatatgttatataatattttgtagtgattgtgtattaggtttttgatttttagtatataattttaataatgattttattttatttgtggtgtttaaaaatatatatatttttggaatttaaaattgagaagatataagtaaaatttagtattttaaatgtagtgttagaaattagattgtagtttaaatttgagtatgtagaaagttttttttttttatgttagtagatgttttttgtgtgaggtttgtttaggtatattgtattattagatataagttagtgtttttgttttatgtttttagaatgataattttttatgaaattaatagaagaatagaaaataattgtaaaattatgatgaagatattaattgttttagaattaaggaataagaaaaataatgtgagttgtagttaaagggattataaaaaattaaaatgaaaatatttttgagtgtttattatgtggttagtgttaagaagttattatttaattttatatttaaaaataattttgtgaagatgatgttattattaaatgtatttgatagattataaaaaggttttggttagtaaaaattgatttaagtagaagagattatgtttttatttagattttttgattttagagattgagagtttgtttattattagtgagtagtgattagattgtgtttgaattattgatagaatttttgatatttatatgtattaggttgttttttgaagtgggagtagagatgtaagggttgttagttttaatgtataggagaaatttttatttattttgtatttattattttaaaagttttatatgtttattttgggtatgtgttgaagaatataaggaagtattaaattattttttgttttgaggtttgattagtaagttggtttgaggttgttaaataaaatataggtttttagttaaatttgaattttagatatatattataatttattggaaatttaaatttaagtgggtattttttggttttatttgttaaattttttgattttaattgggatatatgagtatggattatagtgttagttatgtaaattatagtgatagcgattttatatatgtttattttttaattttttgtttgtaaagaaagtgtttagataatttaagaataaaaagatagacgtttttgatttagggtatcgtttttaaagggtaaagagagttttgtaaaggtcgtatttaaagtttgggatttgtttatttttgtaaattgtttgtatgagaatgttatttttttgatttttttttttttgaggggaattgattataaaatcgagagttttattttaggttaaggttggaaatttgatgtttgttagtattattgggagtgggagattgagagaaatgagttagttcgggtattaaatgggaataaaatggttttggttgtgatttattattatagataattagtggattagtggtatagaaattaagaaagaagatgttatggaagataaatgatatgatttgatgattgattataaaggtaaggaaattagtaaattttggttttttataagtttattttttggaaatatagtattgtattgggattagaattttataatatttttattttttgtaggattaagatttttaatagatgttttttaaagtaatttttagttgttttataattaatagtggtttgtttaatatagatttttttagatggtttatatttatggtttttatttagggatagtttattatttttttttttttttttattatttttggggaatatgtggtaatgtttggaggaatttttggttgttataatagggattttttttgatatttaatgagtagaagttagggatatttttagagaatttgtaatgtatataatagtttttattattaataaagaattatttggtttaaaatgttaatagtgttgaggttgagagtattggtttatattgtgttttttttgaaaagtttagatttatatttttttgttttgttttgttttgttttgtttttttgagatggagttttattttgttatttaggttggagtgtagtggtataatttcggtttattgttagttttgttttcgggtttatgttatttttttgttttagtttttcgagtagttgggattataggtgtttgatattgcgtttggttaatttttttgtatttttttaatagagattggtttttatcgtgttagttaggatggtttcgattttttgattttatgatttgttcgttttagttttttaaattgttgggattataggcgagagttattatgtttggtttagatttatattttttatataattattatttaatttatttttttatggttaatttttgtttgttttattataaataattagatagttgtataaatttaattatttttttgttgaatttatttagtgtagagagtcggaggttggagaattatgattaatttagaatttttattgaggtaatatgattaaatagtaaattgtttattatgaatatagagtaggggtaaatttttttttgtgttggttattagaaggtttgttgagggtaattattttttggcgttgagtttttttaggttatttattgggatatttagaatttattgtttaaggaatgtagttttgtaaggttgttttggagtaagtagtagatcgataatgattttttttttgttatttttttttagtaaatacgaaggaagtttaaggtttagggtttttatttataaagagtaaggtgtttttgatttttttttttaaatatatttttttgtttttatttttacgtttatttttttatgtttagtttaatagggtttatggtatagtgatgtttaaatagcgatagggcgatattatagtggtttttaaatatagggatatgagaatgtgaataaagaagatttggtggagtagaggaattgaatttgataagacgagtggggatttcgagatgagtttgttggtagttgatataaggttagtgttttaaagaggtattgggagtaatataaggttagtgttttaaagaagtattgggaacgggaagttttttgaattagggtaacgtgaggtagaatttgtttattgaagaaaaatattatgtgtagttgtttaaagttttgttgaaataatttggtgtttaggttagattttagatattaattataatgttgtaggaggttattatgtataatttatggtttttatagataggtatttttgatatggaaaattgggatagagtagaaggattaaaataggtttagtaaaaaggttttaaagttgattttttcgttttttttatttggagtttagtttatattgtttttttgttattattttttttttattttgttggatagtaggagtgatgttttgagtttaaaaatttgaaaaaatttgttgttttatttatagttttaattgaaaataaaaaataggagaaggaggataaaaattggtttatattattttttttaatagtagaaatatttgtattgtttttttcggtagtagaaatagagattttaatatagagaattttatattttgttgttatagttggagagttttgaggattttgtattttttttatttttgtaaggtttgatttaaataatttatagtagtttatttatgaatatattttattagagtttaagttgttgaaggaattaaaaggagtgtggtaaataatggtgtatagagtttgtttattttaggattgttagtatttgtatttggtgttgtgtgttttttattttttaatgtaaagaatttggtttatatttgtttgttttttagtgtatatttgatatggaatttaaattggtaagaaatgtgtgtagataaggttagacggaattgtgtggttggatatagagatattatagaggatatgtttttaggtaatggtttttatttagatttggaatattaaatggtatttttaaatgttagtagtgtgtataggttgttaaatgtgattgggttataattttagaagagggagttttagtgtaattttttttatatattatgtaagggtcgtaagaattttatgtataattttttgtatgattatagaaggtaatgaagtattagatttattatatcgtagttgtagtgatgttaattttaattttagtttttgagaatgtaaatgtagattgtaaacgtgtatcggtatttgtgaggtgtataaaaaatttgggaaatttttttagagtttgttaagatgtgggaattgaattttatcgttttataatattagtgtaagtaatggttaatttagtagttgataaatttaaaaggaattaagggttaaattttaaaatgggaaaatgttataattgtggaaaaattgtatttttttttttttttgagatggagtttcgttttgtcgtttaggttggagtgtagtggtgtaatttcggtttattgtaagtttttttttttaggtttacgttatttttttgttttagttttttaagtagttgggattataggtatttgttattatatttagttaattttttgtatttgtttaagagatggggttttattatgttagttaggatggtttcgattttttgattttgtaattcgtttattttggttttttaacgtgtttggattataggtatgagttatcgtgtttagttaaaattggatattttaaaaaggaatttcgttagattttaggatagaaaggatattacgatgtagtgttttatttagcggaaaaaaatattaggattttgtttttattgtaataaaggaaattattaggttaattagggttgtttaaaattttatcgaaatagtatttttatgtcgggaaattagaagggggtttggattcgggttttttaaataatgagggtatttttagtttagattatagttttattttagggatgggttttaggaaaaatattgatttttggtgttttttattttaggaatattaggaagtgtaggattagatatttttattagagaaagaattatattagttggaggagataaatttattaaggtttttattggtatttggggatatttattaataggatatataggattaattttaggtaaaagtttttttaatttgtaaggtatgattgtagtttttggaatagttgattttatttatgaaggagaaatttaagtagttttaatgtcgaaaatttttgtatttttgaattgggagaatatattgttcggtcgttgtttattttttgtaaattaaatttttttttatgaaaggagaaacgaggaaataaagggtttgggagtataattataagggaagtttatttattttattttatagtttataggatttatggatagaggagttgaagtgttagtaatatttagtaaggattgatttttagtatggttttttagattaatttttatatttttagtgggagtaggagtagttaaaagtgtttaatagagtgttgatattttattttgttttggttcggatggatagttatgtattttttagttttatgttgtaaatatggtaattaatttatgggatcgagatttatttatagtatggaatatgagatttataaatgaaaattttgataatttagaatttaaaatgttgaaggatatgggatattagagtgggaaaggtttagggaaatttttacgaggaaaagttaatttaatattaataattggaaaaaatagaagagggttaggtcgttaggatttttgatgagggttattgatattttttttttattttttgttttattattagaatggttagtgataaattcgtatgtgtggattaatggtttttattttaggagaagttgatataattttagtagttagtataagaataataggatataggatatgtagaggagttagtaagtttttagaatttattagtgtttgttattttaaaaaagttcggaaggtggtgattgttgtatgtttggagttaatgtataaattgaattaatgggtttattatagtaaggtttgttaattttagtggttatttttagagattggttttttgtagtaatatattttaaggattgtttttttattatattattatataagaaggataagtttcgatttgttttttttgtgttttttattaattaaaaagaatttgttttttgttattaatggagagttttattttaaggtatgtttaatagttttacgttatgttagtattttgtaggataggtattaaaggagttcgaaatatgttttttattgtttatattatttattttatggatgatatttttttggtcgtttttatagattaaattttatattagttattttaagaaataaagtaggttttaattaaatggaatgttaatatagttttagaaaaggtataaataatttcgttatattattatttagataatattgttattgaaagaagtgtacggttttaaaagtagttttttataaagataggttatagattttaggtcggtcgcggtggtttacgtttgtaattttagtattttcggaggttgaggtaggtagattataaggttaggagattgagattattttggcgaatacggtgaaattttgtttttattaaaaatataaaaaaattagttaggagttgtggcgggcgtttgtagttttagttatttaggaggttgaggtaggagaatggtatgaatttggggggttgagtttgtagtgagtagagatggtgttattgtattttagtttgggcgatagaacgagtttttattttaaaataaataaataaataaaaaaaagataaatgagtgtttatgtggtagtatgtgaattaatgtagaattttataagtatagttgtattttgaagtttattttgaattttagatgttatatttatattaataaaaagtatagtaattatttaaatgtataataatatgtttaatattatatagttatattaattgatgtaatttatagttttttttagtgtttttttttttgaatattgtgaaatgtattagttagtaaagtcgttttgtatttttttttatgataaaataagagaaatataatataaagtgttatagttttaattaaatgaggaaattataatgggaattaagaatgagggattgaatattttttatataaaatatttattattttaaaatataatgtggttaggtacgatggtttacgtttgtaatttagtagtttgggaggtcgaggtaggaagaatatgaggttaggagatcgagattattttggttaatatagtgaaatttatttttattaaaaatataaaaaattagttaagtatggtggtaagtgtttgtagttagagttatttgggaggttgaggtaggagaatttttgaatcgaggaggtagatgttgtagtgagttgagatcgttttattgtattttagtttgggtaatagagatagattttattttaaaaaaaaaaaagagttgttttatgaatagttgatttttatagttttcgatcgattttttagatttatgaatatttggattgtatagttgattttattatattgttagggtaaatgttatataaagttatttttaggttttttattgtatataggtggtttttgttagttttttgtttgtgtgtgttttggaggggttattaaatttgggggtagtattaggagatatatttgaaaaagatatttttatttagattaaattattaataaatttttaattttttttaatttattaaagatatttttatttgtaaataggtacggattaagttttttagttaatagttgttattttgttatgttattagatattcggggttgttgtttttttaggcgtttatagaattatagtattttttagtattgaaagatttgaaagattatagtgtttttattttaattgtgagatatgaaataatttttttaaatttataatattaagatatggtgtaataaggattagtttaaatgttttcggatttataattatgttttttttattttttttatttttaaatatatttatatatttatttttgtaaatagttgttttgttaagtgggaaatgaatgtttttataaggtttaaatttacgaatatattattgattagtatagagttggtttataatcggatttaattaaagtgttttatatgtaattggattaaattttttaagtattaatttaaaaataattttttaaagaaggaaattttgttttagaagaggatttttatatagtatttttgattagtaattgatgatgttattgaatttagatgttgattggttttttaatacgagattattcgatttaggagtaagaaagttagtaattttttttttataatttggaatgtgggtggaggggtttatagttttttttgagtaagatttgtttttttttttggtttttggtttttttttgttttttagtatggtgtgtttgaagttttttggaggtttttgtatggtagcgttgatagtgatattgatggtgttgagttttttattggttttggttggggatattcgatataagcgtatattgtgggtgttgagttattatggggtggggaaaatagggagttttgttaatattgtgtttaggttatgttttttaagattttgtgacgttttggttagagattgtgtatttgtattattggattttaaattattttttttacgaaaggagtttgattatttgtttatgatatagtttatgagattgtgtaaggggttttcgtatagattatttttttttaaatttttattaataaaatttttgtattatatgtttttagggtgtttagaggatttggtaataaggatgttaaaataatttttttatatagtatttttttttattatgttgatttacgttagataaaatgacgtttttattgaaaattttgtgggagttaagataatttaaagcgttttttttagaggattttgggttatgttttttataggaattttggtgttggttttttttttttaaatgtgaggatgtattaatggtttttttattattttttttttttttttttttgaattttaatgtttataaagtttatatttttgtagtgtatgtaggttttttgatagaagttatatttagtgttttgttttttttatggggaaaaatttttggaattgaagttaagatttttagtatttggagttattttatagataaagagtatttttggggtgttttttggtgtttaaagaatttaaggtattttcggaaaatttggttcggtttagtgtttattatgaattttttttaatttttttatagaaattttttttatatgttttatatgttttaattagatataataagaagatatttaattaacgtaagataaattatatgaaattttatttttgtaagttaaaaatagttaaatattagaaatttaataatgtttaaattatatattgtgtggggttatagagataatgtggatattgtttatattttatagggttgaaagttaatgggtaagttttgggaatttattgttttattggggttttgttttaaattttttaggtttattcgttatgtttttagttttttttaattagttatgtttgtttatttttttttttagtttttatttttttttagttatgttgttattatttttagaaatttttaaagtttgtatagatttagagtattatgagatttattgaaagagatttttttttttttttgagataaggtttggttttgttatttatgttgtagtttagtgttatgatttaggtttattgtaatttttgttttttaggtttaagcgggtttttttttttagtttttagagtagtggagattataggtaggaaattacgtttagttgatttttgtaattttgttagagatgagattttgttatgttatttaggttggttttaaattgttggatttaagtaattttttagttttgattttttaatatgtttgggttataggtttgagttatcgtatttaggtaaaaaatagatgaattttaatttaaaaatttattattttttaaattattgttaatttttatttgtgaatttttataattagaaggaggagaaagaagaattttgtttgtattttatatcgggaggagaaggggtttagtgtgatattaaaatgaaagagtgttggagtttgagtttttttttgttttttaggatttaaatagtgattagtttttagatttttggtttatttatgtaaattatatttattttttttagtagttattgtgtattcggttttattttaagtttaaattattgtatttgattaagatagagagggtttcgatttttatggaagttatataataatagaggagatagatattaatttaatatgtaattaataaagaagataatattagagagtaatagtgtattgaagaaaagatattaggtttgtggaaaagagagaaatggatttatttaattttagtttatgtgtttagaaagttttgtttgagaaagtgatatttagttgagataataaaataagtagagagttatgtgaagatttaagggacgaaagttttagggagatagaatgtgggggtagggggggtgggaagttttggtgtgggaaattatgtgtagggatagaaagaaggttagagagattgaattatagtatttaaagaaatgtagaggtagaggatgaggtaggaagtagagaggaagttaggagttttattatattaggttttgatgtttatggtaagaaatttgaattttattttatttatttttatttttttattttattatttattttttgagatggagtttcgtttttgttgtttaggttggatgtaatggcgtggtttcggtttattgtaatttttgttttttgggtttacgtgatttttttgttttagtttttcgagtagttggaattataggcgtttgttattatgttaggttaattttttagtatttttagtaaagatagggttttattatgttggttaggttggtttcgaatttttgattttcggtaatttgtttgttttggttttttaaattgttgggattatagttattagttttcgtatttagtttgaattttatttaaatagatgtgagacgttattggatggttataaggagagttaatttatgtttagttttagaaattaattttagttttaaagtagagggaaatttatagtattaaatgtttataagagaaagtaggaaagatttaaaattgataatttaatattaaaattaaaataattagagaagtaagagcgattatatttaaaagttagtagaaggtaagaaataattaagattagagtagaattgaaggaaatagagatataaaaaattttttaaaaaattaatgaatttaggagtttgttttttgaaaagattaataaaattgatagatcgttaataagattaataaagaagaaaagagagaagaattaaatagatgtaataaaaaatgataaaggggtattattatcgattttatagaaatataaattattattagagaatattataaatatttttacgtaaataaatttgaaaatttagaagaaatggataaatttttcgatatatatatttttttaagattaaattaggaagaagttgaatttttgaatagattaataataggttcggaaattgaggtaataattaatagtttattaattaaaaaagtttaggattagacggatttatagtcgaattttattagaggtataaggaggagttggtattattttttttgaaattattttaattaatagaaagagagagaattttttttaatttattttatgaggttagtattattttgatattaaagtttggtagagatataataaaaaaaaagagaattttagattaatatttttgatgaatatcgatgtaaagatttttaataaaatattggtaaattaaatttattagtatattaaagagtttatttattatgattaagtgggttttatttttgggatgtaaggttggtttaataaatgtaaattaataaaggtaatttagtatataaatagaattaacgataaaaattatatgattattttaatagatgtagaaaaggtttttgataaaatttaataattttttatgttaaaaatttttaataaattaggtattgatggtatgtattttaaagtaataagagttatttatgataaatttatagttaatattatattgaatgggtaaaaattgaaagtattttttttgaaaacgggtataagataaagatgtttttttttattatttttatttaatatagtgttggaagttttagttagggtaattaggtaggagaaggaaataaagggtatttaattaggaaaagaggaagttaaattgtttttgtttgtagatgatatgattgtatatttagaaaattttatcgttttagtttaaaatttttttaagttgataagtaattttagtaaagttttaggatataaaattaatgtgtaaaaattataagtatttttgtatattaataatagataaatagagagttaaattatgagtgaatttttatttataattgttttaaagagaataaaatatttaggaatttaatttataagggatgtgaaggatttttttaaggagatttataaattgttgtttaatgaaataaaagaggatataaataaatggaagaatattttatgtttatgggtaggaagaattaatattatgaaaatggttatattatttaaggtaatttatagatttaatgttatttttattaagttattaattattttttttatagaattggaaaaaattattttaaagtttatatggaacgaaaaaagagtttttattgttaagttaattttaagttaaaagaataaagttggaggtattatgttatttgattttaaattatattataaggttatagtaattaaaatagtatggtattggtattaaaatagagatatagattaagggaatagaatagagtttttagaaataatgttatatatttataattatttgatttttgataaattttataaaaataagaaatggggaaaggattttttatttaataaatggtgttgggaaaattggttagttatatgtagaaagttgaaattggattttttttttatattttatataaaaattaatttaagatggattaaagatttaaatgttagatttaaaattataaaaattttagaagaaaatttaggtaatattatttaggatataggtatgggtaaggattttatgtttaaaatattaaaagtaatggtaataaaagttaaaattgataaatgggatttaattaaattaaagagtttttgtatagtaaaagaaattattattagagtgaataggtaatttatagaatgggagaaaatttttgtaatttatttatttgataaagggttaatatttagaaattataaaaaatttaaataaatttataagaaaaaaataaataatttaattaatatgtgggcgaaggatatgaatagagattttttaaaagaagatatttatgtagttaaaagatatatgaaaaaatgtttattaatattggttattagagaaatgtaaattaaaattataatgagatattattttatatttgttagaatggcgtttattaaaaagttaggaaataataggtgttggagaggttgtggagaaataggaatatttttatattgttggtgggattgtaaattagtttaattattgtggaagttagtgtggcgattttttaatgatttagaattagaaatattatttgatttagtaattttattattggatatatatttaaaggattataaattatgttgttataaagatatatgtatatgtatgtttattgtggtattatttataatagtaaagatttggaattaatttaaatgtttaataatgatagattggattaagaaaatgtggtatatatatattatggaatattatgtagttataaaaaaggatgagtttatgttttttgtagggatatggatgaagttggaaattattatttttagaaaattattgtaaggataaaaaaataaatattatatgtttttatttataggtgggaattgaataatgaaaatatatggatataggaaggggaattttatatattggggtttgttgtggggtggaggaagaggggagggatagtattaggagatatatttaatgtaaatgaagagttaatgggtgtagtatattacgtggtatatgtatatatatgtaataaatttgtacgttgtgtatatgtattttaaaatttaaattattaaaaaaaaaatagataatttttttttttttttttttttaagatggagtttcgttttgttgtttaggttggagtgtaatggtgtagttttagtttattgtaatttttattttttaggtaatttttgtatttttagtagagacggggttttattatgttggttaggttgtttttaaattttttattttatgattcgtttgttttagttttttaaagtgttaagattataggtatgagttattgcgttcggtagaaaagagataatttttaatgaaaatttttttttttttataattattgtttttttatttgtgaattttttttttaattagaaagaggagagaaaggaagtttgttttaattttttatagggaggagaagggatatagtatgttattagaatgaaagggtgtaggagtttgagtttttttttgttttttagaatatttagggtgattagtttttagaatttcggtttatttatttagattataggtatgtttttgagtaaaagttatgttttggtttttgttttaggtttagagaattttatttgaataagataaaaaagatttttatttttatggaatttaatattagaggagatagatagtattttaataaatatttaataaaaaagaaaaatttagagagtaatattgtttttaaaaaaaaagatattagggtgataggatagagagaattggatttatttaattttattttatattggatttataggtagtttgggagttttttttgaggagagtttatatttagttgagataagaataataagatagttatgtgaagatttaagggataagtgttttagatagatagaaaaggggaaaggttaaggaatgggaaggcgtgtgttgtgttgaagagatagaaagaaggttagaggggttgaaggatggaaagtaaggggtggagtggtagaagatgaggtaagagagagagaaagttaggagttgtattatattcggttttggtggttatagtaaggaattaagttttatttaaatatattggaagtttttgggaggttataaggagagtttattaatattatgttgcgggaagttagggattttaaatagagggatcggttgaagttatgatagaagaacgtggattgtgaagattttatgtatatttattagttttttaaattaatatttttgtaattttttatgtttgtttttattgtaatttttaaatataaattgtaaagagtttatggaaatttattatttttttaattaatatttttgtgattttttatgtttgttttttttttaattttttaattttgttagtcgaggaggatgtatgttattttaggattatgtgataattgtattaattgtataaattgtatagtatgtgtgttgagtaatatgaaatgtaggtattttgaaaaagaataggataatagtaattgtttagggaataagagagataattttaaattttgattgtcggtgagttaggtagaatagagttatatttttttttttttaaaagtaaatgggagaaatattgttgaatttttttttttagtatggaacgtttttgagaaagagaatgcgtatttaggggtaggtttttgaattggtttttcggggcgtatttattttttatggtcgagattgtagaggtgagatagattttagttttttatagcgtttttaggtttattaggaagaggaaatttttatttaataaattttggttagatcggttgattttaaaattttgttttttgataagatgttattaatgataatggtgtttgaaattttattagtaattttaatttcgttttggttttgtggttttgtgattttattttgtttttatttattttgtgatattttattattttgttaagtatttgatgtttgttatttatatttattcgtatattttttttttttttgaaaatttttaataaaaatttgttggtttttgtggtttgtggggtatcgtggattttattaacgtgtgatgttttttttagttttaaaattttttttttttgtattttgtttttttattttttaagttagttgacgttgaggaaaatagaaaagaatttacgtgattattagggtaggtttttcgataatgtttaattttaaaaataattttagttattatgtggagattggattgttggggtttataattggagaatagtagaattttttagggaagataaatttttggttttatgtagtgtagtagtgataaagatagatttagataaagtgaatagatttgggatgtttttttgtatgatttgttaatggattaaatgtaatttatttttaagtattttgttttgataaataggtggatggtggtgttgtttattgaaatagggaagaatgtgggaggaaatgatttgaagtgggtgattagaaatgataattgtgtttattaaaattgagatgatttttgaatttatatgaagtaattaggaagttaattgaatataagagaggagtttagggtgaggttagggttggaggtatttatgttggggtcgatgtaggttttgtgttaaattttagggaagtggaagaggttgtagagggagatagatttttgtgtagaaaaaatattagagggttataggatagtataagggattgagaagattttttagagatgttggagaaaaaaaaaaatttaagagaatgtgatgtatgggaattaaagataaatgattttttcgaggtgagggagtggttagttgtggtgagaattatcgataggtgagtgaagtgagaacgtgatagagaagtaagtgttgcgtttgaaggagttgatatttgtagttagtggagtatttaggatggaaagtagattggattatttgaagagcgggtggaagaagtgagggttggatgaagtttgatttttttgagtagcgagttttagggaaagattatgttttgggattagggagttagttggatttaaagaaaatgaataaagaagttgaagagaagtaggatgatttgcgaattagagatagatgtttagttattggtaatgaagtattagaaggtttttgtgtatagtggtgataggttatgtaaaaggttattagtttatatagttaatatttattagtgatttagaatatattagttattattttgggtgatgagaatggagtaataaataaagtaaatttggtttgtattagcgtggagtattgtaatattttgtagtgattaattattaggtttataaattttggtatggaaatttaatatttattttattatatttttggtatttaaaagtatatatatttttggaatttaaaatttaaagggtgtaagtaatttatttattgttataaagttagtgttagaaattagattgtaattttaatttgagtatatataaattttttttttttgatattagtattttttttttgtgtgaggtttaggtatatgaattattatatataaattagtgtttttgtttttatgtgtttaaaatggtaattagtgataaattaataaaagataattgttaaattatgatttagatgttatttgttttagaagttaaggaatagaaaaataatgaagtttttttttatagggattgtaaaaataaaatggtaatatattagagtgattattatattattagtattaagaagagttattatttagttttatttttaataataattttgtgaggaatatattattgttggatttattttatatatatttttaaaggttaatggttgttaaaattaattttagtagaaggggttatgtttaaatttagattttttgattttagagtttgagtttataattattattagtgaatagtgattagattgagtttgaattattgatagaattttttatgtatagggtgtgttttagggtgggagagagatgtaaggtttgttagttttaatgtaaaggagaaatttttatttattttgtatttattatttgaaaatttttttatgtgtacgttgttataggtatgtgttaaagaatataaagaagtattaaatttattttttttgagtattattagtaagttgggtttaggttgttaaatatagtataggatatttagttaaattcgaattttagataaataataataatgtatttgaaatttaaatttaattaggtattttttatttttatttgttaaatatggtaatttaagtttggtatatgagtatagattgtagtgttaattatgtaagttatagtgatagtaattttatatatttttattttttaatatttttatttgtgaagaaggtgtttagagaatttaggaataataagatagattttattttatttaaagtgtttttttttttgttattatttttgaagggtgaagggagtttgtgaaagtttttatttaaaatttggggatttgttcgttttttggaaattatttatgagagaatgttatttttttagtttttttttgtattagtttgtttttaggttgcggataaagatatatttaagattggataatttataaggaaaaagggttataatagatttatagttttacgtggttggggagattttataattatagcggaaggtgaaaggtatgttttatatgatggtagataagagaagaatgatagtaagtaaaagggtttttttttttataaaattattagattttataagatttatttattgttatgagaatagtatggggaaagatttgtttttatgatttaattattttttatttggttttttttataatatttgggaattgtgggagttataatttaagataagattgaaatgtttacgtagttaaattatagtattttttttttgagaaggtttaattatagaaataagagttttgtttttgtttaaggttggtaatttgatgtttttttgtattgttgggagtaggaaattgaaagttagaaaatgaattagttgaggtagtgagtagtggattagtgatatagaaattaagaatatgatttggcgattggtaaggtaaataaattagtaaattttggttttgaatgaattaattttgttagaaaaatagttttgtattgggattagatttttaaaaattttaagttttatgtaggattaagattttaaatagatagaatattggtagagtttttagtgtaaattttaaatattttataattaatagcggttttttaattatagatgttttagatggttatattagtgggttttatttagggatagtttattatttttttgtttttttttttttttttttaattttttagggaatatttggtaatgtttggagttatttttggttgttatattaggagttttttttgatatgtaataagtagaagttagggattttagtagatagttttttttattaagaaaatattatttagtttaaaatgttaatagtgttaaggttgagaatattggtttatattgtgttttttttaaaaattttatatttatatttttaaaatatatttattttttagtttagttttttatggtttagttttgtttgttttattgtcgaaaaaaaaaaatttagatagttgtataaatttattgtttttttgatgaatttatttaattaatgtaggtttaagatttttatttttatttttttgttttatgtagtttattttaaaattttgatgtgtttttgataattattatttttattaatttttaataattggtaattataagttataaatggtgacgattattttaaatattttttagtaaaatgttttagatttttgtagtaattttatattttatattattgataatgtaagatgttttttatttattgtggtatatatatattacggaatattatgtagttataaagaggaatgagattatgttttttgtagagatatggatgaagttggaagttattatttttagtaaattaatatagaaataggaaattaaatatcgtatgtttttatatataaatgggagttaaataatgagaatatatggatatagggaggagaataatatttattggggtttgttgggggagggtagagttggggagaatattagggaaaagagttaatgcgtgttgggtttaatatttaggtaatgggttgatagttgtagtaaattattatggtatatgtttatttatgtaataaatttgtatattttgtatatgtatttagaatttaaaaaaaaaaattattattttaaaaatgttttttatttattttattttattaaatataaggatttttttttatttttgattttttatagtttatttaaatataaatataaaaatattaaaaatatatatatgtatagtatttgaaatttgtgtatatttatatatgtatacgtatgtttgtatgtttatatatattgaaattatagatgtatatgttattagtaagagttttgtgatatttttgagtttttatttttttagattagatttgttaaatgagtttcggtaataaattaaaaatagtagtaagtgaattcgtgagttttttggatttagaaagtttaaaaaaaaaagtttgtgaatttgtgttggggttatggattttttaattgttttttattatatttagtataaatcgaaattttaatatgataatgattttaattgttttttttttgtgatttttttagtttaatttttttttttttttttttttatgttgtgttttagtgaatttttttttggttttttgaagaagtttattaatttttttaagtttttgtatatgatattatgtttatttgaaatgtgtttttttttttgtttagagatatatacgggttttattttgttttttggtttatatttattaaatttgtaaggttatatttgagttgttatttttagagtttttttttggtattttaatgtaatttagattattttatttttttttttagaattttatattttttttaatatttttcgtttttgtataaggtgttgcgtgtttggttttttgttattaattttatttttttttaagtttttttagcggagggatgaggtttatttttttcgtttggatttttaggagatagtatagatgagatataaggtaagtattaaggaagtatttatagaatggaggtagtgggttttgtttaaggaatgagtagagtgtggtatgataggagggagtagaagtgttttttggatggaggtttttaggaggaggaagcgtaggagatagtgatgaggaaggtgattttgatttagagttttgtaaagaggcgtttagtttagttcggaaatgggtagcggattttaaatggtattttacgtttttcgtagttttttttcgttttaggtagatggaagaggaatttttaggtggtcgggggtggttggtgggggttagttaaggtgtttcgtttttcgttttgttgattgtgggtatagttattattttttttttaggatgtcgtttaagaaatcggttttttatgtttttgcggtatattttttggagtagattaaatacgagtgttatttttgtaatgggatagagcggatgcggtttgtgtagagatttatttatatcggaaggagtatgcgcgtttttatagggacgtcggaaagtttcgggcggtggcggagttggagcggagaagagtttaggaatgtaaatagttagaagaattttttgggttgtttgcggggtttgttggatatttattgtagatataattacggggtttttgagagtttttttatgtataggcgaggtgagtaaggcgggtgggggaggggagtagggtttttgagaatagggagtgtgtgtgtatgtatacgtaagtattttgtgggagggtgtaggattgtgagttagaaggaattaggagggtttaggtaggtgagtgtagagtggggatttgtttgtgtgtttgttgtgggagggaatataggagggagttttagtttgtttttttagttttttgggtagagatgagatgagatgggggtgggaatggtggtgtagggggttggagaaggagattttaatcgttttgaattattagagatgtaggaaagggaaatttatttagtttgttgttggtatgaaagtttaggggagaagagatgagaaatgataatgtgagggataatgtgaggaggttagttataaattgtttttggtatattttttttatgatttcgaaatttttgaaataaaagtgtatgatatttgtttgtataagtattttattgagaaaaaagtattgaattaattttttttttttttattttaaatttttattttagttttagggatatatgtataggtttgttttataggtaaattgtatgttaggtgtttgatgtatagataattttattattaaggtaataagtatagtattttataggtattttttttgattttttttttttttttattttttatttttaagtaggtttttatatttattgtttttttttttgtatttatgtgtatttaatgtttagtttttatttataagtgagaatatgtggtatttggttttttgtttttatgttagtttgtataagataatggtttttagttttatttatgtttttgtaaaggatatgattttgagaggtgacgttggttgggtttttgggttgggtagggatttggagaatttttttgtttagttaaaggattgtaaaagtattaattagtattttgtgaaaatatattaattagtattttgtatttagttaaaggtttgtaaatgtattaattagtattttgtagaaatgttttaattagtgttttgtgtttagttaaaagtttgtaaacgtgttaattagtattttgtaaaatggattaattagtaggatgtggatagggttaaataagggaataaaagttggttaatttagttagtagttgtaatttatttaggtttttttttatattgtggaagttttgtttttttattttttgtaataaattttgttgttgtttattttttgggttcgtattatttttatgagttgtaatatttattgttaaggtttgtagttttatttttgaagttagtaagataataaatttattagggggaacgaataatttaggacgtattatttttaagagttgtaatatttattgtgaaagtttgtagttttatttttgatgttagcgagattataaatttattgggaggaatgaataattttagatgtattatttttaagagttgtaatatttatagtaaaggtttgcggttttatttttgaaattagtaagattacgaatttattagaaggaagaaatttgggatatatttgaatatttgaaggaataaatttcggatatattatttttaagaattgtaatatttattataagggtttatggttttatttttgaagttagcgagattaagaatttatcggaaggaattaattttggatataattttattttttttatggttgtatagtattttatggtgtatatgtattacgttttttttaattagtttattgttgatgggtatttaggttgatttaatgtttttgttattgtgaatagtgttgtagtgaatatatgtgtgtatgtgtttttatggtagaatggtttatatttttttaggtatatatatagtaatgggattgttgaattaaatggtaattttttttttagttttttgtattttattgttttttataatggttgaattaatttatatttttattagtagtgtataagtattttttttttttgtaattttattagtatttgttattttttgattttttaatagtagttatttatattggtatgagatggtattttattgtgattttgatttgtatatttttaataattagtgttgttgcgaatttttttttatgtttgttggttgtatgtatgtttttttttgaaaagtgtttgtttatgtttgtttatgtttatattttaatgaggtggtttggttttttttttgtaaatttgtttaagttttttatagattttggatattagatttttgttagatgtatagtttgtaaatattttttgttgtaggtgagtaataattatttgggttagtggcgttagggtaaaagaatttattaagatagttgtaggtagaaaaaaaagtagatttattagagaaagtaggaaaatatgttgtaaggaggtaataggtaggtaggttagtagaagagaagttgattgtacggaaataagggtttgtaggagattttataggatggtttttaggttgtagagtgttatgtgtagtagtaataatgttagggttgtagtgagttagtttatagatgtttgatgatagttgggtacgggaagattgtgagttatttgtataggaaggttgtgtgttttggattatgaggaaagatagatttatagtttatttgttttatttttttgtttttttttggttttattagtttgattttttttttcgaattaggatttaatattttttttattttttaggttttttatttattttgtcgatagttttttttattgtatagaagtttttaagttaaattaggttttatttgttaatttttgtttttgttgtgattgtttttggtgtttttgttatgaaatttttgttaagttttatgtttagaatggtatattttaggttattttttagggtttttatgatttttggttttatatttaagttattaatttattttaagttgatttttgtatatggtgtaaggtaggagtttagttttagttttttgcgtatggttagttagttagtatagtattgtttattgaatgaggagttttttttttattgtttgtttttgttatttttgttaaagattagatggttggagttgtatagtattatttttggattttttattttgttttatttgtttgtgtgtttgtttttgtattagtattatgttgttttggttattgtggttttatagtatagtttgaagttgagtaatatagtattttttattttatttttttgtttaggattgttttagttatttaggttttgttttgtttttatatgaattttaaagtagtttgttttagttttgtgaagattgttaatggtagtttaatgggaatagtattgaatttataaattattttgggtagtatggttattttaatgatattgagtttttttatttatgagtatgataattttttttatttgtttgtgttatttttgatttttttgagtagtgttttgtagttttttttgtagagattttttatttttatagttagttgtatttttaggtaatatgtgtgtgtgtggaaattgtgagtgggattatgtttttgatatgggttttagtttgagtgttttttgtgtataggaatgttgttgatttttatatgttgattttttttattttgaaattttgttgaagttgtttattagttaaaggaatttttgggttaagatttggagatttagggttttttagatataggattatattatttgtaaatagggatagtttgatttttattttttttttttgaatgttttttatttttttttttggtttgatgttttggttaggatttttaatattattttgaataagaatggtgagggagggtcgggtatagtggtttatatttgtaattttagtgttttaggaggttgaggtgggtggattacgaggtgaggatattaatattattttggttaatatgatgaaatttggtttttattaaaaaaaaaaaaaaaaaaaaaaaaaaaggttaggcgtggtggtatgtgtttgtagttttagttatttgggaggttgaggtaggagaattgttttaatttgggaagcgagattgtagtgagttgagatcgcgttattgtattattttagtttggtaatagagtaagattttgtttttaaaaaaaaaaaaaaatagtggtgagagagggtatttttgttttttgttgatttttaagagcgatgtttttagtttttgtttatttattatgttgttggttgtgggtttgttattgatggtttttattattttgaagtatgtttttttaatgtttagtttattgaggtttttttttttttttaagatggagtttttttttgttgttaggttggagtgtagtggtgggattttggtttattgtaattttcgttttttgggtttaagcgatttttttgttttagttttttgagtagttgcgattataggcgtatgttattatgtttagttaagtttttatttttagtagagataaggttttattatgttggttaggatggttttaattttttgattttgtgatttgtttattttagttttttaaagtgttgggattataggcgtgaattgagtatttttaatatgaagtgttgttgaattttattaaaagttttttttatatttattgagatgattaggtggttgttgttttttattttgttttatgtgatggattatatttgttgatttgtatatgttgaattaattttgtattttaggggtaaaatttatttgatcgtggtatattagtttttgatgtgttgtttgatttggtttgttagtattttgttaaggatatttgtatttatgtttattaagaatattggtttgaaattttttttttttgttgtttttgttcgattttggtattaggatgatgttggttttagaatgaattggggagtaattttttttttttaatttttttggaataattttaataggaataggattaggttttttttatttatttggtagaatttagttgtgaatttatttggttttaggttttttttggttggtaggttttttattattgatttaattttagaatttattattggtttgtttaggaatttagtttttttttggtttagttttgagagggtgtatgtgtttaggaatttatttattttttaaatatatatttatttatattagtttattattatgttgttaataaaggtatatttgagattgggtaatttataaaagaaggaggtttaatggattcgtagttttatatggttggggaggttttataattatggtggaaggtgaaaagtatattttatatggtagtagataagagaagaggatttgtgtagggaaatttttttttataaaattattaaattttatgagatttatttattattataagaatagtatgggaaagatttattttatgattaaattattttttattaggttttttttataatatgtgggtattatgggatttataatttaaggtgagatttgggtggggatagggttaaattatattattttattatcggttttttttaaattttatgtttttatattttaaattaattatgtttttttaagagtattttaaagttttatttttatattaatttaaaatttatagtttaaatttttatttgagataaggtaagttttttttgtttatgagtttgtaaaattaaaagtaagttagttattttttagatataatgagggtataggtattgaataaatgtatttattttaaatggaagaaattggttaaaatgaagggatttaaaggttttatgtaattttgaaatttagtagagtatttaaattttaaattttaaaaaatgattttttttgattttatattttatatttaggttatattgatataagaggtgggtttttttggttttgagtagtttcgtttttgtggttttgtaggatatagtttttttttaagttgtttttatgggttggtattgagtgtttgtagtttttttagtgtatgatgtaagttgttagtggatttattattttggagtttggaggatggtgtttttttttttaaaattttattaggtattgttttattgagaattttgtgtgagggtgtttattttatattttttttttgtattgttttagtagaggttttatatgagtgttttgtttaggtagtaaatttttgtttggatatttaggtatttttatatattttttgaaatttaggtggaggtttttaaattttaatttttgatttttgtgtatacgtaggtttaatattatatggaagttgttaaggtttggggtttgtattttttgaagtcgtggtttgagttttatgttggttttttttagttatagttggagcggttgagatatagggtattaagtttaaagatcgtatatagtacggggatattgggtttagtttaagaaattattttttttttttaggtttttaggtttgtgatgggtagggttgttattaagatttttgatatggttaggtatggtggtttatatttgtaattttagtattttgggaggtcgaggtgggtggattatgaggttaggagatcgagattattttggttaatatggtgaaatttcgtttttattaaaaatataaaaaattagttaggtgtggtggcggatgtttgtagttttagttatttggaaggttgaggtaggagaatggtatgaatttggtaggtagagtttgtagtgagttgagattatattattgtattttagtttgggcgatagagcgagattttggaaaaaaaaaaaaaatatttttgatatgttttggagatattttttttattgttttaataattaatatttagtttttcgttatttatgaaatttttgtagttagtttgaatttatttttagaaaattggatttttttttttattgtattgttaggttgtaaattttttaaatatttatgttttgttttttttataaaattgaatggttttaatagtacgtaagtaattttttgaatgttttgttgtttagaaatattttttgttagatattttaaattattttttttaagtttaaagttttataagtttttaggatagggataaaatgttattagtttttttgttaaagtataatgagttatttttgttttagtttttaataagttttttatttttatttgagattattttagtttggatattattgtttatattattattagtattttgggtaaaggtatttaataagtttttaggaagttttaaaattttttatatttttttatttttttttgagttttttaaattgttttaatttttgtttgttatttagttttaaagttatttttatatttttagatatttttttagtagtgttttatttttttttattagtttgttatgttgttgataaagatgtatttgagattgggtaatttataaaagaaagaaatttaattgattgatagttttatatggttagggatgttttataattatgatggaaggtgaaaattatattttatatggtggtagataagataagagaatttgtgtagggaaatttttttttataaaattattagattttatgagatttatttattatgatgagaatagtatgggaaagattcgtatttatgatttaattattttttattaggtgtttttcgtggtatgtgagaattgtgggagttataatttaaggtgagatttgaatgggaatatagttaaattagattagtatttaatataggaatatttagatttataaagtaagtttttagggatttttaaagagatttagattttaatataataatatttggagatgttaataatttattgataatattagatagattatcgagataaaaaattaataaagatatttaggatttgaatttagtattgaattaaatggatttgatagatatttatagaattatttatattaaaataatagtatatatattttttttattattatatggtatgtattttaaaattgattatataatcggaagttaaatattttttagtaaatgtataagaattgaaattataaaaaataattttttagataatagtgtaattaaattagaaattaagattaagaaatttatttaaaattttataattatatggaagttgaatcgtttgtttttgaatgatttttgtgtaaataatgaaattaaggaagaaattgagaagttttttaaaattgatgagaataacgatataatatattagaatttttgggatatagttaaggtagtgttaagtgggaaatttatgtattaaatgtttatatgaaaaagaaagattttaatttaataatttaatattataattaaaagaattggttaattaggtataaattaatattaaggttagtagaagataagaaataattaaaattagagttgaattaaaggagattgagatagaaaaaaaaataatatttaaaagattaatgagtttaggaattggttttttaaaaaaaaattaataaaaaaaaaagatttttagttagattaataaagaagaaaagagagaagatttaaataattatatttagaaattataatggggatattattattgattttatagaaatataaataattattagagaatattaaaaatatttttatgtatataaattaggaaaattagaagaaattgataaatttttggatacgtatatttttttaagatagaattaggaagaaatttaatttttgaatagattgataatgattttagaaattaaattagtaataagtagattattaaataaaaaaaatttttaggattagaataatttatagttgaattttgtttgatgtataaagaagagttggtattatttttgttataattagtttaaaaaattgaggaagagggatatttttttaatttattttatgaggttagtattattaggattagtattaaaatttggtagatatatatataaaagaaaattttaggtaaatattattgatgaagatttatgtaaaaattttttataaaatattggtaaattgaatttagtagtatattaaaaagttaatttataatgattaagtatgttttattttggtgatgtaaggttagtttaatatatgtaaattaataaatttgatttattatataagtagtattaaagatagaagttatatgattagtttaatagatgtaggaatggtttttgataaaatttaatatttttttatttaaaaatttttaataaattgagtagtaagtgaatataatttaaaataataagagttttttgtgataattttatagttaatattatattaaatgggaaaaagttagaagtattttttttgaaaattagcgtaagataaggatatttttttttattatttttatttaatatagtattggaagttttggttagggtaatacgtaagaaaaagaattaaaggtatttaaataggaagagaggaaattgaattatgtttatttgtagatggtatgattttatattaagaaaattttatagttttagtttaaaagttttttaagttaattaataattttagcgaagttttggtatttaaaattaatgtggaaaaattattaatatttttatatattataatagttaagttgagagttaaattaggaacgtaattttatttacgattgttatatatatacgaaatatttaggaatatagttaattagggaggagaaagatttttataaggaaaattataaattattgtttaaagaatttagagatgatataaataaatggaaaaaaatattatgtttatggaaaaggaagaattaatattgtttgggcgcggtggtttatatttgtaattttagtattttcggaggttaaggtaggcgaattatttgaggttaggaatttgagattaatttggttaatatggtgaaattttatttttagtaaaaatataaaaaaattatttaggcgtgatggtgtgtatttgtaattttagttattagggaggttgaggtaggagaattatttgaatttaggaggtagaggttttagtgagtcgaaattacgttattgtattttagtttgggcgatagagttagattttatcgtaaaaaaaaaaaaaaaaaaaaaaaaaggaaaaattaatatgatgaaagtggttatatttttataaagtaattagagaatagtttatcggtttttttttttttttttttttttttttttttttttttttttttttttttttttttttttttttttttttttttttttttttttttttttttttttttttttttttttttttttttttttttttttttttttttttttttttttttttttttttttttttttttttttttttttttttttttttttttttttttttttttttttttttttttttttttttatttttttttttttttttttttttttttttttttttttttttttttttttttttttttttttttttttttttttttttttttttttttttttttatttttttttttttttttttttttttttttttttttttttaatttttttttttttttttttttttttttttttttttttttttttttttttttttatttttttttttttttttttttttttttttttttttttttttttttttttttttgtttttttttttttttttttttttttggagataggattttgttttgttagataggttgaagtgtagtggtttattgtagtttcgaatttttgggtttaagtaatttttttattttagttttttaagtagttgtgattataggggtatgttattttatttatttgataaaaaaataaaaaataaaaataaaataaaatatttggtcgggtacggtggtttatgtttgtaattttagtattttgggaggttaaggtaagcggattacgaggttatgaggttaagattattttggttaatatggtgaaattttgtttttattaaaaatataaaaattaattgggcgtggtggtgtgtatttgtagttttagttattcgagaggttgaggtagaagaattgtttgaatttgggaggcggaggttgtagtgagtcgagatcgtattatggtattttagtttggtaatagagcgagattttgttttaaaaaaaaaaaaaagtgtagacgttggggttggttttaaatttttggttttaatttattttttttttttggttttttaaagtgttgggattataggtataagttattatatttggttaagtttggtagttttttgaaaaattaaatatatatttttatatgtttatgaattatattttagatatttatattagagaaatgaaaatttatgaatttatgtttatagaaaaattttaaatatatgtttaaaatagttttatttatagtgattttaaattagaaatagttaaaatgttttttaataggtaaatagttaagtaaattgtgttgtatttagattatggaatattatttagtaataaaaaaaaaaagattgttgatatatgtagtagtttggatggattttatgggtattatgttaagtgaaaaatattagttatatattgtatgattttatttaattagtatttttaaaatgatattattttagagattaatagtaaagaaattagtggttttaagttgttaaggtgattgtgtggggggaatttggttataaagggaagtatgatgaagatttttgtgatatggaatagttttgtgtttgattgtggtggtggttatatgaatttataaatgtggtaagatatgtataaaattatatatatatattgtattaaggtatttttttggttttgttattgtgttataattatttaaaatataaatatttggagaaattgggtgaaggcgtatgtagaatgtttttatattgtttttgtaattttttttgaatttataattattttaaaataaaaaaatattaaaatggtttttttgttgaaattttaaattttagaatattaaatgttggtaaggatatagaataatagggatttttattcgttgttggtaggaatgtaaaatgatatagttattttggaagatattttagttgttttttataaagttaaatatatttttattatatgatttagtaattgtttttttatgtatttatttaaagtggaaaatttgtgtttgtataaatatttgtttatggatgtttatagtagttttatttataattgttaaaaattagaagtaattaagatgttttttaatagattaatgggtaaataaattatagtatatttatataatggagtattatttaatattaaagaaaaataagttattaagttatgataatatacgtaggaaatttgtatgtatatggttaagtaaaagaattttatttgaaaaagttttatgttgtatgattataagtatgtgatattttgaaaaaggtaaaatattagtaaatagtttagagaatgttaatggtttagagggaggaaggaaggatgagtagatggagtttgggttatttttagattagtgaagttattttgtttaattttgtaatggtggatatatgatattatgtatttgttagaatttatataattgtgtaatatagagtgaattttcgtataattatgaattttagttaataataattattagtattggtttattaattgtaataagtgtattatattaatataggatgttaagtattgtagaaattgggggtgggggagttttgtatataatttttgtaatttttttgttagtttaaaatagttttaaaaataaaagtttattaaaatggttttttttttttttttttttttttttttttttttttgagatggagtttcgttttgtcgtttaggttggagtgtagtggtgcgatttcggtttattgtaagttttgttttttgggtttacgttatttttttgttttaatttttcgagtagttgggattataggtattcgttattatattcggttaatttttttttttttttttagtagagacggggttttattatgttagttaggatggtttcgattttttgatttcgtgattcgttcgtttcggttttttaaagtgttgggattataggcgtgagttattacgtttggttaaaaatggtttttttatatggtagtatatgggtttattttttgtttttttaatttatgtttgtttaagttttagtgtattttttgtgttaagttatttattttataataaagtttgtagttatgtaagaaagatatttatatttattttatcgttagtagttttaagattttgttttgattttttgaattaatagtagagaaatttttttttttttttttttttttttttgagacggagttttagtttgttgttaggtaggagcgtagtggtgcgatttcggtttattgtaatttttgtttttcggatttaagagatttttttgttttaatttttagagtagttgggattataggcgtttattattacgtttggttaatttttgtatttttagtagagatggggttttattatgttggttaggatggttttgattttttgattttgtgattcgtttatttcggttttttaaagtgttggattataggcgtgagttatcgtgtttagtcgagaaattttttatttattagtaaggtttagaaggttatgatgttttggtttatttttgttttgtttagttttttttagatttttattattattttatagaaattttgagaaaaataatagaatgtataattttttgtaatattttattattattaagtatgtatttaattattttgtttgcgttttttttttaattttgatattaatttaatgtagtaaaaattaatattagtatttttatgagtaatgtgaggttaagttaagtaagatattagtgaaaatatagttagtaaatgatatagttaagatgaaatttaagtttaatttattttaatagtatttatttgtagtttattatattattatgaatagtttattttagtggtttatggtaggttttagaaattattttagagataaatattaagttatagttttatagataaatgagtaatagtttatcgtgttttaaatattttttttttttattttaatgttatatttttttttttaattttaaattttatttagtttttttatttaaagatatatttttaaatataaggtggttttaagaattagttagattattttttcggtaataaaataggtatttgagattatgtttaatagaatgggtaaggttagtttttagtgtttaatttttttgtttattaaatttggaatgaacgatgttgatatgtaaattttgtaatgtttatggatttttttgttttttttttttttattttaattttatttgtttttttttattttatgtattttgagatttatattttggggttttagatttattttattgaagatagagttatattattgtttagtagagattttttaataaattaattttattttaggtttttttgatgaggattagattataataagagggttgtttgtagatgtataaaatgagattaagtttaaatgaatcgggatatgtttgatgaattttagaatttataagataaatttaatatttagatattttatcgggaaaggattatatatattttttaggatcgattttttattttttatcgttatttaaagaattggtttaaatattaaaaattttatttaagatttttaaaatagtttattgtgtttagaaaaattatagtttgaggaaattttaaataataagtatataagagatgttttatggggtattttatagtagagatagatttttgtatgttttattttagaggtattgtatggtgataataaaatgataggaaatagaggaaaatagatataggaaaaggtaatagatagggaagttagttagatgttagagtatggagtaatcgaggaggtataattatttttggggtggttatagggttggaaaatgttgaagatgattgtttttattgaggttaaggattgtaatattgttagttttgtaaagttattaaagtagaagtttttttagtgattttttttttaagaaatattattatttatagtaagatatatatagttattaaggagtttaagattagttttgagttttttgttttagatttttttttttttttttttaattttttgattttgtaaaatttttttaatgtttatttaatttttttaatatgaattaattgtatattttattttttaattgaatataataagtaattatgttttatttttttttagagttttttatattatatttgagattaaagaagtaaaagtaggtattggtttttaagagatttttattttatgtaatgaattgattttaatttgaaaggagttaggatttggaaatgtttttgaattgatgatttgttttaggaaatataagttaggatgtgtttaaattttgaggtttatttttttagatttttagatttagtattttttagatttttagatttagtattttaatgtgaaataatggttttaggtattggagatgatttttaagattggagtcgtgattaaggtgttcgtttatagaaagggatgatagattttgaagttttgggatattagatgatattaatgtttgattcgttttagtaaagagaaattaagagttatatttgtttttattttgttttttaaatgtattatattttttttttttattttgttttttttttttagatatttttatatatgtttttttttgattatatttaatttatttttatgtgttttatagaggttttttgcgttttgttgtattgtttttgcgtaattttttgatgatgaagatggttttaataatgatgtttattagatttatagttaggtttagggtatatattacgttttttgtagtttttgggagagggtttggagtattaaattttggggggaaataaggtagagtatatggtaatgagtgtgggaagaagtaatatttagaattaaatgtagggtttttaataaagagaaaagttatttatagattaaagaagaggaagatagaatgatgtattgagagaattatagattaaaaaaaggcggaagttggatagtaggagaagatagttatattaattgtagtagatattatgaaatagttagaatattaagttttatataagtattataggaggaaattttgaaataaaggagattgagtgttggtttatattttagtgtttgagaagaggtttatttaagttttagtgttttattttgtagtcgtaaacgtttttagttgagggtaggaaggggagatagtggaatttgcggaaaaggtggttttttttgggtaggaagattgtttttgatatttttgtggtgataggttttttatttcgaagttacgtgatattgattattggtggggtgaatttgtttatgaaatagatgaggacgttgggtttttttagttttatagggttgttcgtgagtatagttatttttggaggtattgggggatatatgatagatatgatagaaattagttattattgtttaggtttattttttttttttttatgtttaattgtggtataaacgtatttaaaaattttaaagttgaaaaagtagttgaaattgtgttttgagaaatttatgttatatttttagataataatttttgatagtattttttttttaagaaattgagttaatattgaggtataagatatttaaggattttttttttggtttttttagtatgaatttagggtaatgattttgtaggagattatggatgatagagataagatttgagtataataagataggattaaatttataaagtttttagatttttggtatgagaatttggggtttgttaatggtaaggttaggtttttggagggaaaattagttataataatttaatataaagagttgaagtaattatttttaaattatggatttttatgtttaggagtgtagtagagagggaggtattattggtgatcggagtatagttggagcgttttgttatgatttttaggttggttttgtttatagttatgttggttaatgtattttgagttttaaagttggtaaatcgtttaaattttttaagtcgttagatcgtttttttttttgttatatttatatggaaaattttattattattaaagttaaatataaattcgtttgattggttaggatttagatagaattcggtttggatgattatatgtttttttgaaaggcgagaagtggagaaagagagttgggtggggggaattaagagagggaaatgaataatttatatatatgtaggtaggaagtggtggagagagattgggttaagaggaatgaaagaatgatggcgagtagggatgagtgataagataaggtttgggtgaagggtatgttgttgaataaagttgggaggggaaaaataagaaggattggttataaagagggtggattgaaggagatgagggttaaagaatttagagttttgtgaagttgttgtttggttttatgttattagttgagaaattattttttttttagaaatttagtagtagtttttaaagagaaatgtttttttattttttttattcgggtattaaatatatttaggttagaattttagaggattttttttttagaatattgtattttaagaagaaagaaacgttgtttgaaaggttgggttttaaattttgggattaaaaatattttgaatttttatttagtaatttatttagtgattttgagtagattattttatttatttatgtatagtttttttattatgtagttttgttgtggttttgattttgttaggggtttgtttttaagattaaatgagataaggtgagtaattttttaatatattaataagattgtaataagtattgtttatattttagagttagaagtttttttttatttaagggttaaatttatggaaaatatatttggggattgaaatattttaaaaattaagattgagattttgtagcgttatagtttttttgttttttagtatttaaatttatacggtggttatttttatgagaaggttttcgtttggattgattttggtaattttattttttattttaatgttttttaaattgggattgttattatggaagatgttttgttatgattgatattgagaataattaatattaagggaataatgaatatgaaaagagaaagttatatttggagagtatgttgtttttgtggagtgtatcgatgagtgggagatttttttttttttagtttttaaagataaggtgagatattttgttttgttttggtttggttgtttgagacggagttttgttttatcgttaggttggagtgtagtggtattattttagtttattgtaattttcgttttttgggtttaagtaatttttttgttttagtttttcgagtagttgggattataggcgtgtgttattatatttagttaattttttgtatttttagtagagacggggttttattatgttgtttaggacggtttcgattttttgatttcgtgattcgtttgtttcggttttttaaagtgttgggattataggcgtgagttatcgtgtttagttaagatgagagattttaatgtttgattgtgtattgataaatttaggaatttatttatcgtttgtatttatgtaaatatatataaatatattagttgtttttttataaattaagggaagagtttttgtttttttaggtaagtatttttatgtatggtttttttggggtaatagaaatttataattgttattatgggtatgggagttgggttattattttgtttattttaagtttatttgatattttttgtgggggttatgttgggtgaagaatatttttttatagtatatttttataatagtattaatgttgttttggagatgagagagaataatattagattttttatttttttatttatttttttatttttttggaaatattattaagttaatatgatataagatttgttgtattatggagatgggaaggtagggaatggttattattgttttatgaggtaatttatattagtatgtttttttttttttttttttggggtaaattgttgttttttgatgatttttttttttagtaatttttaatataatatatgtgtttaatatatatcgataggatttatattttaaaaaataattattgtattatgtatttagataagaatagggttaataatttttttttttatttaattttagtaaaattatgtgtggtttttagtttttaattttattaattttttagaaagaataattaaagtttagaaatataatttgttaatgtttgttagaaaatatttttttttttttatttttatttttatttttagtttggtttgtagtaggattttgttatttattaatatataatttagttttgattttttaaattaaatttgatttattttagtttgtggtgagggaagaattttattaaattataatttgttatattttttgtcgagattatataatatttgttatattatttttttattttatatattattttttaaatgtttataggttttttttttaatgtttcgtagtttatcgttttagattttatttttttagtatttatttttgatagtttatgatttttgagcgtttattagtatagttatgatgaaaaattttagtatagggattttatttatggttattttttttttgggcgttttgttgggagttagtagagttcgggagtgaggtagaatagataagaataaaagaaaagagaatgtggggtgtaatagagtttgattattaaaatgtaaattaattattttttggttaattagaaaaatattttgagatgacgtatttgttgttaggggaagggtttttgtaaagggtttaggatataagatatttcgtttattggataaagaagtaaagtttttaaataaataggataataacgataataaattaagtatttaagattgttggttaatgacggatagattttttaattttaatttgagttttagatagggatatatttgaagtatattagtgagaatagaattaatggaaatatttaaagtgagagttaaatatagattatatgtttgtgttatgatagttggagagtttgcgtaagggataataaattatttaaatagaaggtaaattgttaggttatggagattgtttgaattttggtagtattgaggatatagttttattaaagaagtttttttatgttttttggagttttagattttaagatgaataatttaggttaagagtttgggatggttggtattgtattttatttagagaaaatgagaggagaaattttgaggtttaatatttttaatattggagaaggatgaaaggttgtattttgaaatataggtagtagttagtggaaatagtgggttgtaaaggagttattttttttttatttttattattttatatatgataagagattggagttgattaatggatatattttatttgaggatttaggttaatgaatatgagagagtataatgggtaaagtttatttttttttttttttttttttttttttttttttttttttttttagatagagttttgttttgtcgtttaagttggagttggtggcgtgattttagtttattgtaattttcgtttttcgggtttaagcgatttttttgttttagttttttgagtagttgggattataggcgtttattattatgttcggttaatttttgtatttttagtagagacggggttttattatgttggttaggttggttttagatttttgatttcgtgatttgttcgttttggttttttaaagtgttgggattataggtatgagttatcgtatttagttggtaaagtttattttattgggaacgttagagataataatttatagaacggttttaatatttttttttttatgttataagattatgaaagttttttttttgttatatgattattaaagatttgttttaaagaatatattttgatgtttaatatagatatttttgaaaattaggagatttcgatttttttgtttttgaagatatagtgttatgaaaaggagaatgttaagttttttttatagaaaggattggaatataaatatttttatgaagagtgatttggtagtgagggagtttatcggatggtgaatttattgttttttttgttgttgttttgttttcgagacggaagttttgttttgtcgtttaggttggagtgtagtggtacgatttcggtttattgaaagttttgttttttgggtttacgttatttttttgttttagtttttcgagtagttaggattataggtattcgttattatgttcggttaatttttttttttttttttttgtatttttagtagagacggggttgtattatgttaattaggatggttttgattttttgatttcgtgatttgtttgtttttgttttttaaagtgttgggattataggtatgagttatcgtgtttggttggtgagtttattgtttaatattagttatgatatgtttgtttagggtggattttttatattgttgtgttggggttttgttttgttatgtagtcgtttttataagttatgaatataaatattttatatattattgattatttgatcgtattaaagggttttgaatatattgtggtattaatttttagatcgttagaaagagatttatagtatggttttttttgtaattttttaggaatattttttttgaaaggtaaagagttaggagaatgggttagatgagagtttatggtattagtttgtgttaagagtttgattttatgatttaagtttgttatttttttttttagaggtaaaattatgtataattttttatgtttgttttttgttggttgttataatgttttgtttttaaatggtgtttgagaaaaatatggtaaatttaaagatattttatatattataatagtatttttaatttaagttgttgtttagtaatttatgatattgtttagttttagaatattgattggttttttttgtgagattattaaatttgggagatttgagaaatgatttttagttttttttttttgtgataggagagaagtttttatttggatagtgtttatggtttttcgtttttttttaaattttaattttttgtgtgtttgagggaatttttaaaggtatttgaatgaggattttttggtgatgttaaatggtgacgagttattatagttatgagaatttagttaagaaataggaatttttgtaattagtttaagtagaattgaatatattatagggaattagtttttaaaattgttagggggtttggaggagtagaagttattgtagaattttaattttaaaagattaggaatttataggaagtttttgttgatgttgtagattttttagagtttttaggagtaaatgtttttagaatataaggttgttgttaaaatttatgtttgtgaaatttgtttttgagatggttgtggtttaatttttattttttaaattttataatattgagtttttttggagaaatgtattttacgtttagaaatttggggtagagtaagtttgagagatgtaatatttttatatttatttttaaagatatagataggattagagaagtaaatggaaattttataaaaattattaaatgtaaatatgtgtgtttatgtttgtgtgtatatttattatagattattttggttttttttatagtgttaagtttaaaattagaggatatatttttttggagaaataagttagggtttttatattgggtttagattaagtttgggattttaatattttatttgtttgtgtggtttgaattttgagaatttttagtttttttttttagttttttttttattattttttatttttttttttttttgtattaagggtttttatggtgttttttttttattaaggattttttattagaggtgttgagggaatattgatttaggtattttttttttaatttattatataagaagttttttttgtgttattttttcgtattttgagaggttatagaagttggtttgttggaatagatttttattagaataaaaattgtgaattgttgatattaataaatgtattaggacgttaataaatgtgttagggtagtgggttaatgggtttttttagtatgttttgtgttaatagagggttttataatgattggatttatttttaatttgggaggatggtagtttgagtttgatttattttttttttatttttatttgaaattcgatgttttaaagattagagttatttttatatagattttttggggtgtgaaattatttttttttatttgagtagtttttgtaaattagaaaacgtatgtaggtaggggtgtgtgtgtgtacgtgtgtatatttagaaattttgaatttatattttagaatatttttttgtcggttaattataagttttattgttataatttaagaatttgtagttagattgttttataattttttgtgtttttgtttgttttaaatggtataagttaagttttataattgagagattttgaaggaaaagattagtttgattaattattaaagaagtttaagggtagttgtttttaatagttgtttttatatagttagtttatggtttgatttatttatttaatattttttgttttttagaaattttggtaatttgtttttagagttttttttatttttattatattggttatttcgaagttagtatagagtattaggatataggatattttgttgtttttatttttttatttttgtttttattttttgaaaaaacgtatgtttttatttgtgaatttttttttagttatttttttaggaatagggaatgattttatttaattatttatgtaaaatagagattagaaattttatttagatattatgttttgttgtatgagtaaattatggaattttattaaggttagaatgattttatagaatttagatgtgtttgtatgtatacgtgtgtgtgtgtgtgtgtgtgtgtgtgtgtgtttgtgtgttgaaggaggagaattaggaaagtattaattttaattaatttaatttatataattttttaatttatttaattgtttaaatattatttgattttattttttatttaaggtatttttttttgtttatttttttaaaaatatttgaagtatataaatgtaattgttaggttggataagtattaaatggaatttttaattaaataaaaatttattgtgtttgtttttgtttttttagagaattttattagagatgttatttttttgcgtttgggtaggaattatagtatattttatgaattatttttttgattttaattaatatgttattttataatttttttaaattgtataagtatattttagtttagtaattagattgtttggtattatataataattgaaagttttaatttgatttaatataaatttttttttatttttgtgtaaattgttgaaggtaggaatgagtgtggtttttttttttttttacgttttattggtattttgaggttatagtttatttagggtaggtttagggaaggggaggaagagaaaaagattagaaacgttttattggaaatgaaatatttgtgttttttgagtttggatgatgttttaagtaaagttttttttttgtgtaaggtttggtaggttttttagatttttttatggttcgtgtttggtgtgtagggaatattaaaatattttttgtgtttataaattttgggagtgtgattatttttaatgtattatagtttttaagatttaatattaattagtttatatattttgttttttaggattttgatggaagtagaagttaattttattatttttaattatttaattttatattaagtagaggaaatttttggtttttttagaaaataattttattaaattttaggtaagtaagttggttttttttttatatacgttgggagtagatgatagaatttatagtaaagagtagatttatttaaggatattataaatttgttttattttatattttttgattattttttggttagtagagagataataatagaaatttgtttgttttattattttttatttatttatttattttattttattttaagttttgggatatatgtgtagaatatgtaggtttgttatataggtatatatgtgtcgtggtggttttttgtttttattaattcgttatttaggttttaagttttttaagtattaggtatttgttttaatgtttttttttttttgttttttatttttttaataggtttttgtgtttatgtgtttttattgtttaatttttatttatgagtgagaaaatttagtgtttggttttttgtttttgtgttattttgttgagaatgatggtttttagttttatttatgtttttgtaaaggatatgaatttatttttttttatggttgtatagtattttatggtgtatatgtggtatatttgttttatttattttatttttgatgtgttttttttattatttttttatgaattttgtaaaagaggtgaataatagtttcgtatgtttataaatagatatttgtgttaatggttttttagttgatattgaggaaagattataaatattgaaaataaaataataaatatatgaaaaagtataaattatggttattgtttgttattggttatatagatataattataatacggtttaggaaatggaggtagaattggttattttagttgtgttttttagtttagtttttttataaggtaatggagaagagtgtgtatataatatgttttttgttagattaagtattattttgttaaggaataaatttgagttatttttaattatttttaaagttgttgtttttttttttaaagtaaaattgatatttgaggttttagtaagttttatgttatgtttaattatttagtattatagtgtttgtttgtttttaagtgattaaagatttttatttttggttatgtgttatataattgaagattatttttttaggtgaaagtggtaggatttttataagatttttaagaggttttttttttagttagaagggaatttagggattggagttttgagaattggttatgtttagataatagtgtttttaaacgatagttatttttgttattttttttttggatatatgtagtattatttggaaatttttttttattaagtatgatttgtgtttatttttgaagattataagaatgtttatgtagtagtttttttttatttttaatttttttttaaaaggtataattgagagtaagaaataaaaaattagaagacggtttatttaaggtatatggttagtaattatagtaaaggagttgagttttaaatatgtaaaatatttattgtagtgaagttaggaagataaggagtgtgaagatgagaagttagaagtgtggagaaggaattattagaggtttttgataagaaagatggtagaaaatgattttttaaagtatttaagtaggtaagattttaaatttaaatgtcgtgaatgagtgaaggaaatttttataaaaaaatagaagttatgagaagaaggtggtttttgtttatattaagtatagtatgggttaagtatagaatgtaagaggggaattagtttttataataaaatagaagagaatataagtggttaaatggtatttaaaaaataaattattttaagatttaagttaatatagatggtttttgatttataatttggtttatgattgtttaattttatgatgggtttattggtgtattaaatgtatttttagtttaagatatttttaagttataatgggtttattgggatataattttattgttaagttggagagtatttgtatatgagtagtggtttatgttgtaaaatgttttttaaaaattaatagtgaggatagagaataaattattttaggtttttgagattatttaggaattttgaatttttaaggtagaaagaaaggtgagaaatatgttagaagattgttattgtttttattgaaatttttttttggggtttagtttttttttattaattgaaaatattattgttatgattatgatattaaagtttatttatatttattagataatagttgtatttttattttatttgagaaaattgggtttaaagaaatttagttttttggttaagggtttatttagaaagtggtaattgtgattttttaaattaagtttttatttttgtagttaataatatgtggagtttaagaattagtttatttaaaatattaaaattatttatattataaatatatttttgggtagggatgacggttggtttttttttgtatattatgtttatatgtgattattttaaaagtttttaggatatatattttttttttgattttttaatttatagtataattgggattaggttttttttttgtggttaatagtgtttaattttttataagtgtttttgatattgagtatttagatattttatgaaagattaaggattttttaagttaggatgttttaattaattttttttttgtgtgtatatttaaagtgtgtttgatttaattaggttatttaaatggtttgtaattttatttataaaattatttataaaatatttaaaatttataaaaatatttaaagtttttttataagtattattatgttttttttgaataagtatataaaatataggatgtattttttttaaataatttgaaggttgaaataatgttttaaaacggataaaattaattgtattttattttgaattttgtggataaatgttttataatattttttttatttttttatgatgtatttaattttaggttaattttttagttgttttttggaaatttgatggaggaagaatgttagttggatttttagataatattgtttatggtataaatggtttttggttggtattttgtatttttattgggaagaatattttatgaatcgtaataaatgacggggatttatagtttgggtatttttaaatgtagtgatttttgtaattgagtatgttttttacggggattttggaagttgtgtttatgggtttgttataagaggtattagttcgtagatgatatgaggattttaagttacggtggatataatttttataggtgtaaatttagttttttgtatttgagttgttatttgggggatgggggtagaggatgaaattagtatttggaataaattatgaattgttttaagaattttttttattgaagaaaaagatttgatttagtattttggtatattttgatttttgtttaatatttttttaagtgaatttgagagttaggtgtggtttatggtaaaaatttgaatatgagtatttagttaaatttgagaatattttttgttttcgggtattgatatattagtaatttttattttatgtttttttttatgtgtatatataggagatatatatatatatacgtatattttttatattttgggtaaaaatttgtatattttttatggttttaatataattaatagttttagttttgttttatttttgttattaaattaatttaattttaaggatagattatatgtttatttaaggatttaaggatagatgtataatattttaatatatgataaaaatatattttaaaaaatatggtgagagatttttggttttaagataagatgaagtaggtataattttttttattttttttgttaagtatagttatagatagatataaaaagtttttgaatgatggagaggagaagtaggttggttttagattatgggattggggaatgatagagtggtgagttttataggttttttttttgtttaatatatttaggaatgagtgttggagaaattggaaaataggaaatattagtagttatagataaaaatattttaaggaaagtatgtttttttatttaagggaataagaaagagtagtttattaggtagataattgatagtaatcgtattattttagttaaatatagaaaaattaggggtttttatttcgttttagttagtaaatattgagtgaggagttttgttttattttattgtttggcgataatgagatattatttagatttattaggtttatgttagaggaagttaattggggatttaggatttttgtttttgtttattagtaattagttatttttatattgtggtgttagtgaagtttatgtgaagagtttggatttttatttgttttgttgtaaggaagtattttttatttattttgttaaggtgttgttagaggaggttaagtagaaagttgggatttttattattgtttaggtgtaaggaggtatttttttttttttggtgttagtagaggttatgtgggagcgttgatgagatttttttttttttagttaggattttgtaagtggaggtttagtggggagtttgagtttttatatttagtttgtagttataaggtatttttgttagagagtttttagttttaagtttattaggaattgaatttgttagtattttgattttggattttttagtttttaggattgtgagaaatatagagggtttttttatagtattgttttgtttaacgttttgttataatgttggtgagaaaataaataggtttttggttagggttattggttatgaggagtttgtgtgttttttttacgttcgtatgggttttttttgtgtatttgagttttattttatattttaaagatatgtatgttaggttaattggtgagtttaaattgttttagtagagtgattttgtgtgtgtgtgtgtgtgtgtgtgtatgtgtgtgtgtgtttgtattttataatggatgggatggtattttatataaggttggttttttttttgtttttgagttgtcgggataggttttagttatttatgattttgaattggaataagtaggttggaaaatgaataagcgaatgaatagaaatgtttttaaaataaaaatttgtaaagtatatgatatttatataattgtataatagtaaataatggggtataaaagtatttagtgagtttaacgtatttgtttttttttgcgtttgagttgtgtggtggtaggaggtgttttttattatttttattttataaatatttgttttttaatgtaatttattattattgtgattattattatttattaatttattaaaaattggataattaattattttatttgttattataaatttattttaaatgtatatatagtttttatttattttaatgtttaatattagaagtgttttgagtttttatttaggagtttggtgatgtgtttgtgattagaaataagttataggaatttaaattttgttcgtattaattagtttaggggtttttaatttttgggttatagattattaatggtttgttgttagatcggtagaggtattggatttttataggagtgtaaatttttgtgaattgtattgtggattgtttatgcgagggatttaggttgtgttattttattttttgttatcgttagtttttaatttttatttatggtaaaatttttttttataaaattagtttttggtgttaaaaatgttggggatcgttgaattagtttatggttaaattagttttattatatgttattttgtttaaagttatagtttttaagaatttattgatgatgttaagtgaggatttttagtaaatgtttgttgtttaatttattttatttgagtgttaatggagttaagtagaggatatggaattttatataatttggtagttttggggtgagagttatatatttaagttagtagattttaagtaaagtatattgttttttataattgggttttttttatttaattagttgaatgtttgattagtataagagggaattttttaatagattgttttagattttatttgtaattttggttttttttggttttatagtagattatttttgggtttaaattgtaattttgttttagttttttttattgttggttttttttattagaatttggatttagtaagtttttataattatgtgagtaaattttttaaaagaaatatttttttatatatatatattttgttagtataatcgttttggagtatttaatatagattttaagggtattattttgagtataaaatgttagtttcggaaggttatatatagtataattttatttatataatattttttaaatgataaaattatatagatgaaaattaaattagtggttggtatagtgtagggatggtgggggtgggggaatggtgtgatttttaaggagggcgagtggtatgaggaagatttttgtggtgatggaatatagttttgtattttgattatagtggtggttatatgaatttatatatgtgataaagtagaaaattgtaaatatattgtattagtgtcgatttttttgtttcgatattgtgttatagttatgtatgatgtaattattgggggaaattgggtgaagggtataagggatttttttgtattatttttattaatttttgtgaatgtataattattttgaaattaatatttaaaaattataaagtatattatttaatttttttttttaaattttaaataaattaatgtttattttgtaaattttttttgtatttttaataatattggatattttttatttgtaatttttttaaaattatagatatatttgatttaagatggtttgatttaggaatttttgattttttaatggtgtaaaagtaatatttattttgtataaattatattttaaattttgattttattttagattagcgatatttagtaagatatttttttataatgttaggtagttttagttatatgattatgaaggtgaataatttatattttatatttttaatttataatatttttaatttatattggatttattgggagttaattttattataagttgaagagtatttgtattatatttaaaaatttaggttattttaaaatagttgtttatatttatatatttataagattatttagtttagtttagatttataagggggaaaaaatatatttaaggtattttaagtttagagagatgtaatatagtgaagtgtattgtaaaagttttgtaaggatagaaaaagtaaaattgtgtttttaaaggttaggaattgtaggaagttattattggttttgtagtattaaataaatttatatttttggtagttgttgttatttgttgttagaagtagaatgatagtaattttttattgttttttaatcgtaagtgagtgtttttttaagaaagggattttggaagaagtggtgtttaggttttaattttaagtgatatggaaaaaagtataaaatagggggaaattgatttagtattaatagataatatttttaatttaaaatattttgaatatttatttttgaatatattatttttttttaatatttttttttgtattttttttatttgtatttatatatatatttgatgaatttttagtatttttagtaatttattaaatttatatttaatagaaatattaaatttaatataatgtatagtattattcgatatagaagattttaaatgttattaattaaatgttagttttttggattttaatttatataaagtttaataatgtgaaaatatatgaagattaattaaatgaaaagagtaaaaattatttataaattgttataataaaggagttagttattattttttgtattttggtagagatttaaagataggtaaagaagtaggaaattttatagtggttaaaaaggatttgattggaggttgttggtatggggaatgtttaaggggtaattagaagtggagtattttatgtaattgggtaggatgtatatttagttttttttggttggttttaagttggaagtaggtataaatattgggggaattgttagttattaattaagttttggttattttaaaataattgttataaaagttattatttagttttttggattgttattagagatagtaatttgattttttgtaagtcggatttaagtagattattttgttggattgtttattgaagataagggaattggttttttaggtaggttgttgtaggttgtgggttaaaggtttatttttttttttttttttttagatggagttttgttttgtcgttaggttggagtgtagtggtacgattttagtttattgtaatttttattttttgggtttaagtgatttttttgttttagtttttcgagtagttgggattatagttgcgcgttattatgtttagttaaatttgtatttttagtagaggtaggggttttattatgttggttaggatggtttcgattttttgattttatgatttattcgttttggttttttaaagtgttgggattataggcgtgagttatcgtgtttagttaggtttatttttatatatggtttggttattgtttgtttttatatttagttttttagaaagtataatttaaaattttatttttttttttattatagtataagatgtattagggttatagtaggataaattgttttattggtaataattataaaaataggataaaattttaaaggtatatttttaaaaagtattgtttagttaagaaagtaaataggattagatgaataaaaattttaaagaagaattatgtaaatgtaagttgacgtttggatattattgttttttttggtagtatttgttgtttgtaagtgtacgttgcgttttagtgttatttttttgttatcgttttttgttgtagaaaagttttttgttataatttttttatagttttttgttgtaagaaagaaattagtagtaattatggggttagtgtgatgtaattagaaaattgaggtattttaaatattttggtttttttaaaatacgttggttaatttttgatgttacggtagaaggtaaaataaaaaattaaagtgttaatttttgaaaggtagtgtaaaattttttattgtttagtggtgttgaggaaataaagatttattattgataagggttttaaaataaaatagacgtaagttttagaagaattggtgaattgatgttaagtagtaataattatttattatttgaggatatttattgatttgagtgtttgtttggagttaataatttaggtttggtttttgataataggtttttttagtggattaagaaaatagtaagtgttttgttatttgacgtggtgttgtaatgataagatttgagagttgatgattttaagtattttgtaggtgttttttttaaaatatttgttaaatgttgaagatgtatggagtagaagattaatgagttaagttgaaaatttttttaagtttagtttaaattttttttagttttttaggattgagaagatgaaagttatcgggttttttattgaaagttattgaggattatgttttagaaatggggtaaaattgaagttatgtattatttagttaaagggataagttttaagaaatgtgttattaggtgattttatttttgtgtgaatattatagagtgtttttacgtaaattagatgttatagtttattatatatttaggttatatggtatattttattatttttaggcgataaatttgtatagtatgtgattgtattgaatattattggtaattgtaatataatgttaattgtttatgtatttaaatatataaaaggtgtggtgaaaatattatatgaaagatttttaaatggtagatttttttaggatatttattatgaatggagtttgtaggattggaagttgttttgatgagttagtgagtgagtggtgagtgaatgcgagggtttaaggtattattatatattattgtagattttataaatattgtaattaagataatattaaatttatgaaaaatgtttttttataataattaattttagtttattttaattttttaaattttatatatttaattttttaattttttgattgttttgtaatagtatagtttaaaatataaatattatataaaaatattttttttatatttttatattatgagtttttttttatttaattttttttttttttttttttttttttattttttaaatttaaaaaaaaaatttaagaaatatatatattagtttaggtttatttagagttaggattattaatattattgttttttatttttatattttgttttattaaaatgtttttaggggttatagtatatatggagaggttattttttatgataattatatttttttttggaattttttttgaaggatttgtttgaggttttttttgaggaggtgttattttttagaaataggtttatgatggtttgtttggttttttttttttattatagatttgtttataagtagatgatttatcgtgaatatttttttttattaatgaaaattttgttgtgttggggtttatgtttttaaatttttaaggagtttgttgaggtttgtaaaagtttttgttaaattttgtatagggaattttatttggggtttttttttttttttttttttagttttttttttttttgattattattttaattatgtatttttgttttagttttaataattttttattagttaattttaaggaattatttttaggagtttttaatgttatttttattcgtatttagtttaaagttgtttgttattttaattaaagttttgtagatttttgtaatttttttatttttggtaaattttttgaatttatagataaattttttgagtgtttttttttagatgttatttatatatttttcggtgatattatttttattttaagtaaggtttttgatgtagttatagttgttgttatttttttagaattgtattattgtttttttagtgtttttttgagttattataataatatgggtaaaggttttttttagatagtaaattttaaaagttgttataattttttgatttattggttggattaaagagggagaagtattatttcgatattgggataaagattattaataataggaggatgtgtaggagaataaataattataaataaaattttgaaagatggtattttttagataatgtttttttatttttttggtatagtaatttaggatgtaattatggaagaggagatgggttatttatgatgttttattatatttgtagtgtattggtagggtatattttatatatatatatatatatatatatatatatatatatatatatatatatattttttttttttttttttttatggaatttagttttgttttttagattggaatgtagtggtatgatttcggtttattgtaagttttattttttagatttatattatttttttgttttagttttttgagtagttgggattataggtgtttattattatattcggttaattttttgtatttttagtagagatagggttttattgtgttagttaagatggttttgattttttgatttcgtgattcgtttatttcggttttttaaagtgttgggattataggcgtgagttatcgtatttggtttttttttatatttttaaaggaaggttttggggtttttattttgttggattataaagggttttaatttgtagtttgtaatattgtttttaagtaagattattatttgtatttaaaagttttgaaagttagtattgatttggtttttttatgggttaaattttttttaggtagtgagaataaagatataatatattagaatttttgggatatatttaaagtagtgtgtagagggaaatttatagtattaaatgtttataagagaaagtaggaaagatttaaaattaatattttaatattataattaaaagaattagagaagggtaaataaatttaaaagttagtagaaggtaagaaataattaagattagagtataattgaaggagatagagatatgaaaaattttttaaaaaattaatgaatttaggagttggttttttttttttttttttttgtaaaaaaagattaatagatagatcgttaattagattaataaagaagaaatgagagaagaattaaataaatgtaataaaaatgataaaggggatattattattgattttatagaaatataaattattattagagaatattataaatatttttgatagaatagattttaaattagtaaaaattaaaagagataaaagagggtattgtataatggtaaagggattaatttaataaaaagagttaattattttaaatatatatgtatttaatataggagtatttagatttataaagtaagtttttagagatttataaagagatttagatttttatataataatagtgggagattttaatattttattgttaatattagatagattaataagatagaaaattaataaagatatttaggatttgaatttagttttggattaagtagatttaatagatatttatagaattttttattttaaattaatagaatatatatattttttagtattatatcgtatttgttttaaaattgattatataattggaagtaaaatattttttagtaaatgtaaaagaatggaaattataatagttttttagattatagtgtaattaaattagaatttaggattatgaaagttatttaaaattatataattatatgtaaattgaataatttgtttttgaatgattattgggtaaataataaaacgaagataggaataaagatattttttaaatttttatttttagttttattttttgtgtgtttgtatttttgatttttatggttacgagataataaattttaggttattttagataaacgaggttgttttaattttatttatatgaggtgtttaggtagttaattttatagaaatagagaataggttggtggttgttagagattgggggtaaggtaaatgggggagttattgtttaattaatataatattttagttatgtaagatgaataagttttagagatttattatataatattgtgtttatagttaataatattgtgttgtagttaaaaatttgtaaagagggtatattttatgtaaggtgtttttattataatataatgaaataaattggaaaatgaaggtggtttagaatttattattgttattagtaagagggttattttaatataaattatttcgttaatattagaggttatgattttttttttagagtttttaattaagatttaggtaggtttttgtttttataaatgttagtgagagatttagttttgaattttagtatttgttggtttagttttttggttttttttttaggtggttttaggagtaggtatatgtgaaaacggggagatttattttgtgttcgatagatttaggttgaaggtagtttttcgtgttttgaatataagtaatatggaggagtttttattttgtttttggagtttggggtttggtttatagtttagtgttgtattatagtttaagaaatattttgtggggaaattacgttatgaatttgagaatttgagaattttaaatatttaattttttagtttgtttttgtgttttttgtttggtttttttttttttagtagatttttttttgagtttatgatattttttttgtatgaataatgaattggtaaatgttttatgggtggtaggggaagagttgtgattgttagtttattttaaaagggttatttattttttgtaattgtattttatttagtgtatgttgtttttatagtttttttttttttttaaagtacgaattttgtgttttaaatttttaatttttttagttggtgtattgggagtgttgagttaatttggtagtattttatagagaagttaaagtcgtatatttatgttttgttatgttttttttggattttattattttttgtttttttatatattttttaattgatgttatgtagaagaaaaatatgagtgataatttgaggttttaggaaatattatatttttttagaggttatttagttttgtttgtgttaggtaatgaggttatgaggttaaggttattaatattttaaattatttaaatttagtttaggattagttagttagaatttaagatttagtttttatgaaggatgatttgtttttattttattttattttatatattagatttttaaggtttttatggaaagcgtatttttattttatggagttttttttttatttgtgaggtatgaaatttaaatttgtttttttagttttttgaatattttgtgaggtttttgtgtttaatggaagttgagttaaatgaaaaggaatataggtattaaatattatatggaagttgaagtagttagttgtattgaatatgttttttttttatataataaatagtatatatttttattaagttggagttggtatcgtaggaagtattttttttttttgtatttatattttttgatttttgggaatgaaaatcgtttgtatacgtgatttttttttatttggttgtggttattattttgtttttttattttaaggaattatttagatgttgaatgatttggggttggataatgatggatgtgaagttgtattttatttgtttatggttagttggaacgtttttttttttataatttatttaagtagtttttaagttgtcgatattagattaattaggtttaggtgagtaggaatagaatttagagtcgttatatatattgggatatgaggatgtttgttgagttgtgttttgtataaattgtgaaaggaaattaaaaatttggtattttaatttattatgttaaaaggaaagaattaaggtgaaagttgagttacgtaagaaattgttttttttttggtttttaagtagatagttatagataaaaggttaaaaatatttttatcggtagttattttatgtttatttaattatatgtaaagcgatgatttattgagagtaagatgaatatataattgattttttttttatttgtttttttttttttgtaatatgtggattgttatattttttttttttttttgttagtttattttttttttttaaatattgaaattatttttggagaaagatatagattagattgtttgtgttatttgatgatttttttttttttgtatgtttttaattttgggaaaataaatttttaaattgtttaagatttgttttagatattttttggtttataattttgatatatattagagttttaatttatgtgatagtttaaggaagagtgaaaattattaaggaaagtatattattggagttatttaattttttttttagtttgttttttatttttaaatattgaaggtttttaaattatttttggagaaagttatagatttgttttttgggtattgttttaaattttagtaaaataaatttttaaattgattgagatttgttttagatatttttggtttagagtattgtaattatggtttttgtatttgtcgtattgtttttttttcgtttgatttattaatgtttaatgaagttatgtttttagtatgtaaaatttaggaaagaaattttataaaatttgttaagtaagaatttaatgttgtataaaatttataatgatagtgtattagtttatcgagaggggagttaatttataaataagtatgagaaaatttagatgaaggttattttattagttttaaaaaagttatttttggtcgggcgcggtggtttacgtttgtaattttagtattttgggaggttaaggcgggaggattacgtggttaggagatcgagattattttggttaatatggtgaaatttcgtttttattaaaaatataaaaaattagtcgggcgtggtggcgggcgtttgtagttttagttattgggaaggttgaggtaggagaatggtgtgagttcggaaggcggagtttgtagtgagtcgagattacgttattgtattttagtttgggtaatagagtaagatttcgttttaaaaaaaaaaagttatttttatttatgaatttaattataaataattatatagtataaataattataattgatatgaaaatatataaagttatttagttgttaatggatatttaagttgttttgatgttttgttattaggaatgaagttgtaatgaatttgtaatagtttttgatgtatgttttagagtagtattgtagtagtaatgtagtatgataatgtatatatatttttaattttattatgttatgttgatttgttttttaaaatgattttaataatttttattttttttagaagtttgttggtagaaatattgatttatatttttgttaggttttgatatttttattgtttttttagtgtggtatttatttatatttttttgatttataatgaagagtttgaaatttttttatatatttatatgttatttatatatgttattataaaatgtttttttttgtttttattatttttttttttagaaaaatatagttttttattaattgatttgtaggaggtttttttatgttttgggtattaattttttttatagtttaatatgttgtaagtatttttatttagtttattaaaaaaattttttttttttagtgagtgattttaattagtatataaatatgttattgtatttttttttttttaaatttaattttgttaatgaatttttatttttaatttgaaggaaatttttaaaaatattgggttgtatttgttatttttatttttttttattttttttttattttttatagattaggttatagtttatatttttaattgaattttttgttattgatatgttttagttttatgttgttaaatttaatggttatttttaggatgttattttatttattatattagaagtattttatgtagttaattattattgtattattgatgtatttttttgatttgttattaaattttattgttttgagatttttattatacgagaataatagttagattttagtttgttttgttaagttttttatttttttaatttttaaatgattgagggtttaggatttattttttgtatttgttttttatgtatttttattttagaattttttatggatttttataattaagtataattttttgttgaagtttttttaatttatattattagttttgatatgttgtttatagttttgaagtatgatttgaaattaagttttgtatattttttttgtttttttttaaataagttttggttattgtagattttttgtatttttatataaattttagaattgtttattgttataaagaaatttagtgggaatattgattaagattgtgttgagaattgttattttaaaaatattaattttttttaaattaaaatatattatatttttttatatatttagaattttattagttttttttattagtattttatagttttatattatatatttttcggtttagtttatgtttaagtattttatgtttttattgttgttataatgaagtgatttttaaattttatatgtgatattttgttgtggtgtatagaattataatttgtttttgtattttattattgttaaatttatatattttaggtatttttaatagtttttttagggttttatatataagtaattaagttttttaggttgtaatgtttattgtttgttaaaaggagtttgaaattatgtgaaatttgttaggtttaaattaatttttaaaataataaaagttgaaagaaaaagttaggttaatttaaaaaataaagaatattttaaaaatagttttttatgtttaattttatgttaaaatataattagatatagttaaatgttttatatatggttatgaaattaaattgtttttaattatttttatattttagtttatattaattttaatggttaggttattttttgggatatagttttttttttattttgttaatttattaattatttttttttacgtgtttataaatgttagaggtgtttgagtcggagtaattttattttgaataggggttgggtataatgaggttgagagttattgggttgtatttttaggaggttaaggtatttttagttataggatgagataggaggtttgtataggatataggttatgaagattttgttgataaaataggttgtagttaagaaacgggttaaaatttattaaaattaatatggttataagagtgatttttggttatttttattgtttattatatgttaattataaagtattagtatgttaaaagatatttttattagcgttatgatagtttatagatgttatggtaatatttaaaattattttatatggtttaaaaaggagagaaatttttagtttaggaattgtttattattttttcggaaaatttatgagtaatttattttttatttagtttgtaattaagaaatgttaaatttatatgaagtatgaacgattttttatattttattttatgtattatattttttttgaagattgttttgatttttttatagttattgaattattataatattagtgtttatgttttttatttttaaaagtgaaaatgatattaataattgaatttataatattttttgttttgttattttaagaatgagtgtttggtattgcgacgtgattataacgaatttaagataatgaagtagttttttttttttattttttttatattttttttggttttttttttttttttgtttttttttttttttttttttttttcgtatttttttagggtggtttagtggtagaattttgttgggacgtttaagagagagaagtatatttagtagtagtagtagtttttttatttttgtttttattcgcggttttgaattgagtttattacgaaatataaaaatataattttagaaagaaagatattggtagttaagatttgggaagttttttaatgggatttttagtttttttcgttattttgaaatcgcggtgtagtcgtaaaattttggaggcggtttttgaataaaattgttatttattggttatgtgtggaattgtaatagttcggtggggaatgtatttcgtagagatggagagttttttagaggttttaagaggattaagtaaaagtatttaggatgaatggtaggttggatgggtgtaaatgtaggaggtttagtagatcggtgtgtttttttttgttttttttttttcgatatttggaagggtattttatttttagtgtgagatatgttcggatatttttgtgagtgtagtttttttggggttttgggaggagtgtgatggtattaatatattttgtatatttttttttcgtaattttttaagggggtatttgtattagttttggagttaattgaggtgggttttatcgaagtttatatttttttttgggaattttagttttataggtttttatttgtagtagaattaattttaggtaattttattatttttaaaaaataatagatgattattgtgattgttttaaatttttgtaatttttttataaaagtaaatttaaaagtaaaaatttattttattttattttatttatttattttttgagatagagttttattttgttgtttaggttggagtgtaatggcgtaattttagtttattgtaattttcgttttttaggtttaagtgatttttttattttagttttcggagtagttgggattataggcgtgtattattacgtttagttaatttttgtatttttagtaaaaacggggttttattatgttgtttaggttggttttaaatttttgatttcgggtgatttatatgtttcggttttttaaattgttgaaattataggtgtgagttattatatttaatttaaattttttaaaattaaaagttttagaggaattggtttgttagatattttttgtaaagtatatgatagttatgtatgtaaagagtttaatttagattgtaggttagttagaattaagaatattttagttttttatttttaaatgtttgggtatttttttatttagaagttttattgtttgttttttttttttttttttttttttttttttttttttttttttttttttttttttttttttttttttttttttttttttttttttttttttttttttttttttttttttttttttttttttttttttttgttaattaagaaaaatggttagaggtgtagattgaatcgtggttacgttgtgaggaaaggttttcgttttgtgagtattattttttttttattggtttcgggaattttaggttttttatttatatttgggggaggagtcgtagggtttttgtaggtgtttttttttttttagttagttagtaaatcgaggggattgtggaggataagttattgtgtttttaggagatgagagttgttgattttttttttttttttttgaggaaacgatatttgtataagttttattgttgggagattttataaagtaattatttttttggtgagttgatttgagagtttttaaaatattttttaattaggtttttaagaaatagttgatggcgtcgtttgaatttttttatatttatagtaatatttttgatattttttggattgattttgattttttatttttatttttaattttttttatttttttatttattttttttttaagattttttatttttagtaatgatatttaatagttataaagggattttgtattatgattatatttttattttatttttataacgatattttaatgtgagttatttatatattatttttgtgtaaaaattaagaaaattgagatttttggaaagaatagatttatttaaagtaaagtttgtttaaatgtatagtaaagttagaatgaaaattttagttagtttaaatttagggttttttttgtcgtttagtggttgagggagttatgaatgtgggttataggtgatcgtcgtatttgaagaagggtttgtaagtaaatcgatttgcggaatatttttgaagtcgatagtgagttcgtttttgttgttttttggtggttaggtagatttatgattttttttttttgttttttttgttttcgtcggatgtttgtttttttttttttttagttttagtagtttatgttttgttttttcgttttttttggaggtggattgtagttagaatgtagagattgtgattttttttttttttttttatatattaatatttttttgtataaaatgattttttataatatgtagtataatttaggatatagtttttagtataggtagatttttgagaaagtgtatgtagatgatttgtgagaatatatatacgcgagtgtaaacggagtttttttacgcggtgagttggcgttgatgtgattgattataaaaaatttaaataattgtagtatttggtattatagagatgatattatagaatgtatgtaatgagcggtatttttttatatatttaggtgtataaagtaaatttttatatttttttattacggattttaatttgtatgttaagtattattatgttttttgatagaggagtttatttggtaatttttagataaatttaggggtttttatataattaatttaatagtagcgttttttttatttgtcgtgtgatttttaagttttgaggtgggaggcggagtagggttggtgtagaagtttttttttatatttgtattattagtttttataatatgttattatttcgtcgtgttttttggtcgttattgttttttttatagtggtgacgattattgttatgtttttgatgttattttttttttgttggaatattttattttagtattttaggtagtaaatttttattttattgttggagttttttagagtttgttattttttgttttggagaattttttttttgttgttattttgagagggatatttgtgggtatcgttattattttgggaatcggaggtgaagtggggtttatttttttttattttaattgagagagaattagggtaaagagatttttttattttcgtttatgtttaattgttttttttttttttaaattttttattttttatagtgaggggagggtttttgtttagattgaaggatggagggggaaatttttatattaagaatcgtaatcgtaagttaggggatttaattatgggttgtttataatgggagggaaagaaatttaaggaaaaaatcggtttaaattttgtaatattataacgttgtatatgtttttattattatattgatatgaaaatttgtaattaaattaaaaattgttttggagaatttttgaaattttgagattatatttgagattttttttagtttaaggaatatagatttaaggggaacgtaaaggaaaatttggtagaaataaaaatatatataaaatatgtttattattatattttttatgtttaaatattatgttgagaaggttattatatttttttggtaaatatttgagagtaattaaattttttattatttagtaaagggagataaagtatttgagtaaaaagagtaataaagtagtttataagggattttggtttagagttttgattttggagagggtagtttttttttttgggtttttgtttttttattagtggaatgagggatggtacgtttgatatttagttttgtttttaattttagttcgatgagtgttatgttttggtggagatttggtattagttgggaatttttgatgtgtggtaaggtggagggaagggtggatagtattcgttgatgtgtgggacggtggggtttgtgtgaggatttaattggggggttgtagatgaggtttttatgaaggttttggttttttggggaaggtgagaattgttagtgttatgattttgtgtgtacgtttgtagaatttataattgaatttagttaaagtttatttgttttcggagttttattgttgagaggattatagttgttaggaggtgaatgtgttattttgatttttagaatgtaattttatttttatagggttttcgggatttggttttgtttttaattggggtgagatggtttaaatttttttttatttaaagttttggaggaggtttttatattttttggtttttttatagttttgtttttgattagtatattttagggttttgatttgtttttgattatttgttatgtggatgaagatatatttggggttaagtgagaagatttagtagtattaggtttcgttttaaaggagagagggagatacgtgagtggtttggattttttggtgaaggatggttacgggaagttggggatattgttttagattatagagtaggatatacggatagaattaatgttttttagggaaatgttgttatttgttatattgttttttatttatatttatattttattgcgtagtttttaaagtgcgattgtagtttatttgatttttatagtgtttttgtgaagtaggttgagtgaggaagaagtacgaaattaaaaataagaaaattaggattatatttttatttgttatggatgatgtggggtatgtgtttttgagttttgacgtttttttatgttatatggttatgatatagtttggaaaatattaggatgattgtttttattatatagtagagaaaatataggtttaaaaaagtaaagaaagatgtttaaggttatatatatatatataaaaatttaatttattttgttttttagaaattttattttagttttttttataaaaatgtattgttttaatatatgataaattatagttgtttttttttttttaatttttttttttattatattttaagttttagggtatatgtgtatattgtgtaggttagttatatatgtatatatgtgttatgttggtgcgttgtatttattaatgtgttatttagtattaggtatattttttaatgttattttttttttttttttcgattttattatagtttttagagtgtgatatttttttttttgtgtttatgtgattttattgtttaatttttatttatgagtgagaatatgcggtgtttggttttttgtttttgcgatagtttattgagaatgatggtttttaattttatttatgtttttataaaggatatgaatttattattttttatggttgtatagtattttatggtgtatatgtgttatatttttttaatttagtttattttttttttatattttatataaaaattaatttaagatggattaaagatttaaacgttaaatttaaaattataaaaattttagaagaaaatttaggtattattatttaggatataggcgtgggtaaggattttatgtttaaaatattaaaagtaatggtaataaaagataaaattgataaatgggatttaattaaattaaagagtttttgtatagtaaaagaaattattattagagtgaataggtaatttataatatgggagaaaattttcgtaatttatttatttgataaagggttaatatttagaatttataatgaatttaaataaatttataagaaaaaaataaattatagttgtttttaatgtttatatagatatataagtttttaatttcgtgaattaagatatataagtttttaattttttgaattaagttaatttatttttattagttagttattatggttgtttggtattttgaggagtaatatttgaggtttttattgaaaaaagttttaatgatttatgatacgtagtaatttgtaattttttttgatatgagttttagtagtgtaggataggttttgaaatttagaattgtttattatttaatgtttaaatataagttattatttattattataatttaatatttaaattttatttagaaaattaaattaaattaaatatgggtttttgagaatttgatgatatatttgtatattagattatatattttgataatattaaaatttattatatttaataggaatagtagttttagaagatttttgtattatatttaaatagtaaaacggaggggttaaaagtttattattttaaaaggtttttatttaaagatggtaatttaagtttagttatttatttttaaaaaatgtgttaaagttttttagtattttgatagtaaattttgtggtagggtattttttcggtattatcggttttttgggttggatgattttttgttgtgggggttgttacgtgttttatagaatgtttagtaatatttttggtttttatttaatatatgtttttttttttagtcgtgataattgaaaatgtttttagatattgttaaatgttttttaagggtaaaatagtttttttgtttattaagaattttggtttaaggtggttattttttttgatatatttttttatagtttatttgagtattggagatggatttttttaatatttttcgaaagttttattgatttgagtaatttttttgagagtttatttgtagatttttttttttatcgttttgatatgaaagatttataggaacgtaagtttttgaagtggtttgtagtaagtgtgagtttattttagtttataaggttgagaaattatgtttggtatggatgttgtggggttttttttatttttatttggtggaaaaaaatgtttttgttttttataaaaggagttagggaggtattagtaatattttttagtttaaggggaggtgattggtaagttttaggtggtaaggtgtttatggtttgtattgttttttaatatttaattttatttttatataaatattatattgtttttttcgatttaggtattgtgaatgggtttatataagtttttttagagatattttatatgaaagtatatattttttataaagtaaatgggtaatatttgtgtaataataattttttgatttatttgattgttaaatttttattttagaatgttgatttttatttttgttttataaaattttattagtagtagttttttggaaagggggaaattgtaattgatttgatattgtttttgagttggtttttttattttgtgtgaagtaagtttttttttaataaaatatttgatatattatatataataagttttagattttttttattttgaagtttgtattttttaatggtaaaattagttttttatttttgttttggtaagttttaaagtttttagttgtgtgaagtatttttgtttagttgggatagtggggttgttgggtttgttagtttttgttagttgggttttttgtttttttaatttattcgtgtttttaagtttattttaaaaggttatttatagatattttttcgattatttttttattatttttttttttattttttacggtatttttgtgtttcgggttttttgagcgttagtattgaatgttggttttttggttgtagtgtggagacgtagagtttttttgtttttttttttatgtgtagaaaatagtggtaaagaaaggttttgtaggaggagttgggaggaggataggaaaaaatatttgaattttgttttataagttttgtaagtttataatagatgaatttaaggagttttgtttgttttggtttggtttggggtttttttaatattattgtttttttattttaagtgtttttttattttagttataagattattttatatttaaaaaattgtttaaaatattgttttatgaaattagggttgttgaggtaggaataattttataaagttttattggaaggtaaatgttaggattgatgtaggaagatatattaacgaagttgagggtggtttaaagtttgttataagttggaaggtttttgtaaggaagtttaggtagaaagaaaggggttttttatattggagttgtttttttttattggagggtataatatagaggttataattattggatatagatgataatatatagattaaaatattttatgtataaaataattagtaaaattttatgatttagaaataaatttatatttttttcgatgttaggaggttatatattaattattatattaaattagtttagaagttatattgaagtcgaattatattaacgtttgggtgtatgagtagatttggttataggttatagaggtattttttaattagacgttattttatgtgtaggaaaaggtaaggattattattgtttattttttaaggagtagagtgatttaggtaagagagatgggaggtcgtgtgtttaattttgttttgtttttgaagtatttttttggagaattgtaggttattatagtaggggttttgtgaaagtatgttagtaagtcgaaatgagtaagtaaggttttttatatttgttatattgttttataatataatacgttaggtaaagggttggatgtgattagtaattgtagagaaatggagttaagtttattttattgattgtgtaggggttgatgtggattttttgttaagattgtataattaatggaagttatggagtgtgtcgggtgtgttatagttttatttaggtatagcgtttttttgtttttgttttagggaggatggtggattttttaggttataatttgtttggtgtagtcgttttttttttatttattttgttgataatgaagtagttaggtaggatttttttttttttttattgtatagtttaatgttttagtgagttagtttgggtttaaaggtcgagaataatatttaagagtgtaagtttggggttaagttatttgtatttaaaaaggaattttttatttttgaggagtttttttatttttaggagtttttttatttttagttgagttatttttggaaagttatttgagtattttatattttagtttttttatttttttaatgagaataatagtagtaattatattttagaggttagtataggttttaggattaaatgagatattaaaagtatttgaattagtggttgtattacgttaaattattaatttattttagtattttggggttaagaaatgtagttgttttttattataaattaagttgtaattaaaaaaaatatttggaaataagaaattagaagaaagggattttggaaattttattagttgaattttgacgttaaaatgttgtattttgaaaaataattatttaaaaatttagtgttaaaaaaaaaaaattagtgttagaaggagatgttagagttttaaggaaaatgtagtatggcgaagtgggaaaaaatacgatatagagtattagagggcgtaggttttgtttcggtatcgtagagttggtgtgtttgtttcggtgtcgtagagttggtgtgtttgttttggcgttgtagagttggtgtgatgtgatgaagttgttggtttttttgtgtttgtgttgtagttttttattttgtaatagttaatttgatggaatgtttttagttttagttttatatttagattttattaatgaagaatataagtagatttttatttaggttttttagttattttttgagtagtatttatttgatatttagtagtagttaagtagggtgaggttttttttagtaggattggatttgtatagagaaagagtaaatggtttcggagtatttagaatgagaaagaatatattatatatgatataaaatgattaaatataataatatatataattgttaaatatttttttaatttgtagataataaggaagagattagatatgttttagaatttgtttggaagatttaaaaatttttagataaattagtgtttttaatttagtataaaatgtttttgtgaaaattgtattgtatatagttttagtaattggttttttgttaattttagacgggaaaaaaataaataaaaaaaaaataaaaaaaaaaatagtttttatatttaagagaagaggaattttgaaaggttaaaaaaagttaataaatggatttattatttaaattttaggaaaataaaatgttaataataagaataaggtttttaatttaaaaagttaatttatatgagaataaatgatttaaggaataaataatttatttgagaataaaaataatttaggtatgttggtattaatattttgaagatgaagaaattaggattttaaattttaaaattttattaagagtaatagatttgttatcgaattatatagttggtaggtgatagatagtaattttatttatatttttgaattgtatttgtttttagtatataaaattgattttgtaataaatagatgtgtaaattattatgttggatttttttaaaatattaaatatatattttttttttttttagttgtttttattttgataggttggatattttaaagtatgtatatgattttttgattggtattttttcgttttttttttttatttattttatagaagattttagagttattggttttgtttattttattttggtcggggttggggaagatgttttgttaatttgttagttattttttaagaggattataatgtacgtggaggtgaggtggtatcgtttagagtttagtatatttgtgtttgtgtatagggatggagtggaggtgattgagatgtagatggaggagtatagaggttgggtagagtggatagagaatggtattgtaaagggaaatgtggtattgaagatatataatatttagtttttcgataatggataatattggtgttatttttaggatgggaattattgtggagaaataagtttgttgtttaaagtagtaggtgaatatttggggaaagatatagggttttaagaggtagagatatattaatttgtggtaagttttgtgatagttgaggaaatttttttgaattattaaggtaatttttaatgtttagttttttattttgattgatttaaaaataagtggttttggagtttttaagtttagtgttaaaatatttttttaaatttaatttgtatagttttgattgtttttgaggattatttggaatttatgatatgtagtttttagtaattttgttgagatatatatttgtgttatttaaggttggtgcgtaagagtaaattaattgttgtatgaatgagtttagttgacgttcggtatttgtattttagggtattggtttttttttatttaattttatttatgtagaaattgagacgtgaaaatgttttttttttgtgaaatgtttttagttagaaagttattaataagattgaaaaggttaagaatgtcgtgttttggagattgttatatattagtgtttaatgaattggggatttatagatgtttttggatatattttttgtgaatgggaaggttttttatattgttgttgtattagttaagtaggaaggagtagggaagaaggggataattgaagaatggatttgttttatgaaaagtaaattattatatgattttttgatagggttaatttttttatgttttaaagagaaaattaagtaaatttaattattaaggtaaatggggaaaatagttttttggagatgttaacgtttttagttgatattgtttttttttttatttttttgggaggttgttttttaatattttttttttttttaatatttattattgttattgtgtttaaggtgatttaaaatggatggaggaatatatatatttttgatatggggggatagggaacgtattgatgtattttaatattaggaatatttataaataagttatatattttttaagggtttaagggaagggagtggattttttttttattagtaagtgattaagatagaatttttatttatggaaaatatagtttttttagtttgggtgtgggagttttacgttaaatagagaaaaaaaatttatgattttataaattgttgtaaattaggattttttaaaattattttatttattgaatagaatatttagttataaataacgtttcgtggagattcgtattttatatgttttcgtttatttatttgttttcgaagattatagttattagtaaaagatgtaggaagaataggtttttggggagtgatttttgattttgtgttaaatttttaattaaattggagtttaagatattatttaaaatattagataatgtgtttaatatagataattttaagatgaaaaaggtagagtttatggtatagaggaattaatgaataaattatagtttatttttgtttgtagtgttagaggcgttgtaaaatgttatgatgtttttttttttcgatttttttttttggatttggagaaaagtattggttagatgttaaaatgtaaagatttagattggggaataaataaagtgtatttgaatttatatttgaatggggagattgaggtcgattttttgttttttagatttttgaatttcggttatttttttgtgagtaacgttattgggattttagtttttgtgatttttgtttttgtgggttttgggtgttagagttgtggtttttttttgtaggtttggggtttgtttttagtatttatatggagggatttggggagagtggagtttagtttgtgtgtattgtaaggggttggtttttagagttttaggtgtattgggaagatattcggggagagaagttgttggtcgtgtttgagtatcgtatttaagataaagatggtttgttttatgcggaagttattttggtggttaggaacgtttttgtagagtttgtgttttgtttggtttataatttcgtttttattgaggagaaggggtcggttattagttttttaggttagtgttttgtttttaggatttatatgtttagattagtaggagaggttttagggattgtattatagtatttcgtatttttattaagagatattatttattatatagtaatatgtattgaaagttataaaatatttatgattggaaatatacgtattatattttatttgaatagttgttatggcgtttgcgttatttttgagttttattttttttttttttgtattgattgtttttatttataagtatttattgtattgtaaagaaaataaagttatatttttttaattgaaatgtttttttatgttgttttgtgttgattatttttagaaatttattatatgaagataattagagatgtagataattatttgtataatagaatattaattatggttttatttataaatagtagtaaaaataattaattttttaatataatagtatagtgtggaattttgttttattatatattatagtattaataaaaagatatttttaaataattttaatggttgaaaaaaatttttatgatgtattatttaatgataaatatgatatttatttataaattgatatttttaattatataaaagttattggttttaaataatttataattgtattaaaatttttaggatattttttatatttggatataagtatatagttatttatataaatggatagattaaaaaaattttaaagttaatgttatattttaattttaaatgaagttgattgtatattatatataattcgtttttttattttgtaatttaggtgatattgtttatgtttatataattttgtattttttgtgtatttataaaaggaatatatgttatttttatgttgatagttaagtatttatgttgtaaatattagaagaaattaatagaattatggggagatagaagtgatagtatttttgttgtgtagagaaaaggaaaaaaagttgtattattgggtaatttgtgggaaagaattagtatttttttgtattttatttttttaatgaattgagtttttttatataatgtataaattgtttttttttttaaaaaatagtttttttttttttttttatattaaattttttaatatgttatttttgttttttttttagagaaattttagattgagttgggtaagtacgaggtgttggtatatatttgtggagggagtttttgttttttttagtagagggaggggagttattacgagattatgtgatttagaggaaaaattgaggtacgattttattaggttttatgtttattaaatattagaggagattagtaaagtaatggttttatttaaggaggttgtagttgtgttatttgatattttgggggtttatggagattttagtgagtattagatggatatttataggaagtatggtattatttttgttttatgtgttgaggggaaagggagttgttttagaatgtgtgggggatgatagtagatagttggtcggggtttggaggttttttgaaaatattttaagtgtgaataagggtagtattattatgataatttgggttgtatttagtatttttttgtttaattttgttatggggttttgtatttgttttttattttagtatatttttaagttaattattattgggagggagttgttattttttgagtgtaatttgggatattgtgagtgtagtaattttttttttttttttttttgagacggagttttgttttgtcgtttaggttggagtgtagtggcgcgattttggtttattgtaagtttcgttttttaggtttaggttatttttttgttttagttttttaagtagttgggattataggtaatcgttattacgttcggttaattttttgtatttttagtagagacgagattttatcgtgttagttaggatggtttcgattttttgatttcgtgatttttttattttagttttttaaagtgttgggattataggcgtgagttattacgtcgggtattttttttttttttttgagacggagtttcgttttgttgtttaagttggagtgtaatggcgttattttggtttattgtaatttttattttttggatttaagttatttttttgttttagttttttgagtaattgggattataggtatgcgttattatatttagttaattttttttttttttttttagtagagacggggttttattatgttggttaggatggtttcgattttttgattttatgatttgtcggttttggttttttaaaggtgttgggattataggtatgagttattgtatttagtttaatttttgttttttaaatttcggagttggattgagggtattattttgttgtatttgagataagtggtttaaaatataattagtcgatggttgagtttttttgagttttttttttatttttttattagtttttttttttttatggtttttttttttagtttaaggtaattagtttgtttttttgtttaggtgtatagaacgtggattttttatgtgttttttttattaattttttgttttttattaagttatttgttttaggaatgtgtatttatgtgtgtgttttaggtgagtttaagtatattttttagtttataaaagagtttttgaggaaaattagggtaataaatataatttaatttttattagagtttattatggtatttttaattttattaggttataaatataaagggaagggtttttggaaggcgtaaagtaattttataatttgaggagagatatatatttgtgtattttatttttttgagattaggaagtaaagttagtgtttggggtaggttgatataagtttgttttttaagaaggttttaggagaagagttatttttttgagttttttgagatttattggagatttagtatatataatacgattttatgttttgttgtttttaagttatggtaattttcggggttataattaattaatacggaaagatggagtttttttttgttttttgttaggtgggagaggagggttttgggtacggaagttttgtaggtgagttttaatgatgggatatttagttttttatggaagttttaagattgaaattattgtttgtagttttataaataatgttttttatttataaaaataatagtttttaaaaatattaattgtatgttaggtacgatgttgaatatgttatgggaattattttatttttttttataataattataaagtttaattgttttatttttatattatagttaagaaataattttagagatatatatggtttgttaaaaattaggaagaaatggtgatgtttattttttaatttatatttatttaatttaatagtgtaagtttttaattatttatgtgtgattttgttagtttatttatttttattttttttatttttaaagtgaataggttgaatttaatttttaatgtagtgtttagttttaagagattagatataatttagtatatttgagaaatgagatagtgtattaattgaatatgttgattgaaagaggattatgtggtatgatgatgagattattaggttttaaggaattagtgtataatttagtgtattttacgttttagaagggaattaattttttagtggatatttagaaggtatttagaatatataaataataattaaaataaaataaagtaatatattttagtataaaattgtttggaaggttgtgtataaaatcgtatagaaaaaggaggttaattattgtatgtttatatttataagggggagttgattggtgagaatatatggatgtatggtagggaataatatatattggatatttgttgggggatgggggagggagagtattaggaagaatagttaatggatgttgggtttaatatttgggtgatgggatgatttgtgtagtaagttattatggtatatgtttatttatgtaataaatttgtatattttgtatatgtatttcggaatttaaaattgaaagaaaaaaaaagtgggttaggtatagtggtttttaaggagtttgtattttagtagaatattaattattaataaatagggttgtatgatttttttagtattttaaattttagttttatttggattttggataaaaggagttttgtttgtatttgtaatgtattaaattaattgaatttttatatttatattttgttttttttagtttttattgaagttaattttagtttttaattatttatgttaggtagggtaagttagtttaagatttaatatgtgtataggttatatacggatagggaataaaatttttatatggataaaggagatgaggaaatagtttgttttattaagtaatttatcgtaagttatgtggatgtagaaatagttttaaattaatttttagtttattttttttgatttttgtttttagattttaatagatatataggagaggaaaataatattgttttaggtaaaattataggataaagtaaataaaatgttggaaataattgggagttaattgttatttggaatggaaggtaataatttgaaaatttaaattgtgttgatagggatttttttttttataaaggtagttggtagttttcggttaatgatataatgggatgttaacgtttttggttagtgattttatgtagagaattaataattttatgtttgtgtttttattataaatgattatattttatgtaaaattatttttattatttaatagaaaaggacgatatttaatttagaatagagaaaaaatggtacgggtagggtttgatgagaatggaaaatgtaatatagtttgggtttaggaaagtttttagagaatatttttttttattttgtatagtgggagaattagattttttttttatatttattattgttttataatttgtattttgtcgatttttttaattattgattttaaaatgttaattttaatttttaaaattatttgaggatatttaattggtgtgtgtttataattttatttatgtggagtattggggaaataaaatatagcggttggattagatttataaggtattataaagtttatttagaggaaagtttttttaaatattattattaaaagtttatatgagatacgtttttaaatttttttttattattacgttagagggtggggatggttttaacgtttttaagttttataggtttgtgtatttttgtttacgttgtagggttttttaggtatttaatgtaaattattttgtttaattttgaaatattatgattttggtagttgtatagtaaatttatagtttaagaaattgaggtattaagaagtagtttaagatagattaagaagtagtttaaaattatatagaattgaagtgttagaagaaaaattttagatagattaaatttagtagagtttaattgagaaaaggatgatttataaataagttattttttagaattagaacggttttagagaatttaaagtagtaatttggttagatagtatttatggatagaaaatggaaatgaggtatagaaaatagaagtgaggtatagagatagttttattggttgtagtttggcgtttgtcgatttgaatagggttttaatagttggttgtttgtaattaatagaagtgtagtagttgttatttagttatttattataaaagtgtatttttaagttagttttagtttttaagttaggtttatttataaaataattttgtaattaaaatttttagaataaaatgagtaatttataaatttggttttaggatgtttttgtatttgagtgtttatgtaataaattgtaatttaagttaggtttttagtagttgacgtattaagttaaattgtagtttgttatataaggagttaggtatagaggtatttggggttaaatttataaattgtttattttattttgggtgttttttgtttgtttgtttttaaagtttcgttttgttatttagtttggagtgtagtggtatgattttagtttattgtaatttttgtttttcgggttcgagtaatttttttattttagttttttgagtagttgggattataggtatttattattatgttcgattaatttttgtatttttgtagagacggggttttattatgttggttaggttggttttgaatttttgatttttggtgatttattcgtttcggttttttaaagtgttgggattatagatttgagttattatatttagtttatttgggagttttaattgtaaaattattttattattggtttgtaaattgaaaaaaatataggtagaagtaggtagggatttaattattgttttatttagattgatatatattatggaatgatttttttttaaagaagagtaatttttattttgagtttatgaaatttttattttatttaaggatgattttgagttttatagtaattttgggatgtttatggtttttaaattttaatggagttgtttttagagatgatattattggttttattttgatttttttattgtgttttgtttattttatttaatagtttttttaaaagtgaatggatttttttagtttattttcgttagagtgggagaagatatatagttaatttgttatttgttttttaaggcgaatgtatagagtatggaggtgaggtgggatcgattttatcgttattttgttgtgtatgtgtatatggatggggattatgtggttggagagtagatggtagagtatagagggaggattgtattggtgagtgacgttattgacgagggtagattgattttgtagatatttagtgttagattttcggacgacgggtagtatcgttgtttttttgaaaaagatgatgtttattaggaggttagtttggatttgaaggtggtaagtaagaattttagatagatattttgtatttaatatttgtttttgttattttaatatgttagtttttggataatttttttgatatttgaaatttttttaatgtttatttattattaaatttatattaaattttttagtgtgtgaaattgttatagttatttaaaatttataaatttaaatggatgaaatttaattatttgggtatataatttgtattttttttagtatttttaaaaattgattatatttttaaggaaatttgagtattttattatatattttataaaaggtttattgttttatagtgtgttattagaattttgagaaatgtaataaaattttagaaattgtaattatttgaagattaaattggatttattgtgtaaattaaaattataaatattgatagttttggtagggataggggagaaaagatgaaattattttttgtagtattattttttattgttcgtgtgtgtgagaattgaaacgtttaaggttagtagatgttattgagtatatataggtttaagttttggatatgttacgtgttttttttacggattttgattttaaattaataaatacgtttagttatgggggcgtatgttgagaagttttatgagtttcgtattttttgttattggacgtagatatttataaggtttcgatttttgagaatatttttttatttcgtatgttaattttgtttatgtgatttatgttttggtcgaagttattttgtttttagggatagaataaatgttggatttgaatatttattttattttttaattattttagaatgatttaggaatataaagaataaaaataagtaaataaataaaataagaaaatgttttagttagttttatttttaagtggagtgtaattttttttaagttttttttttttttttaagttttttatatttttttttttttttttagtgaaattgttgtttatttatttatttgaaaggattttaggttttggttgttttttttgttttaggtttgggtttttttttattgattattgtggaggggtaagaagatggagaaatgtagtcgatgtgttttttagatgggtggtttttatagttttacgtgttatggagggatatggaaggaaagacgatattattatttttttaggttttgatttaaggtagttacgggttgttttacgtgtagatattgttaagggttataaatattttcgttgtggacgttatttgttttattagtattttttttttgggcgaggagaaaatcgtaatttttttttttttaggttggtgattttttatgtttttttaggtttggaaaataaatatgaagattaatttagatttatttattgtattgtttttttttttttgtgatttttatttgttgttttttgacgaggttttttgttattttttgtaaagttggtttttaggatatttagggattttatttttttgagtttttttttgatatttttaattagcgttttgtaattatttttattattggatatatattaaattttcgtaattgattttgtttttattttttttttttaaattttttttttttgatgtgaaaataattaaattatagaattttgtgtttttttttttatggaggatttttttttggattagaaattgatttttattaatattatttttatggttgcggtttgagtaattttatttttttttttttaagttattttagtgattgtgtgatatagttggaagagagaagggaaaatttgtttgtgtatgtgtatatttttgagacgagtaaatatgaaatatttgtatttttttttttgtatttttagagtagggaggagtaggttaattgttttttgggaggttaaatttttttttttttttttagtttagaagttgtttagatgaaaagtataattttaatattgttttagttttatagttttaagggatttttgggtttttattttagagtttaggatgatatttttgtggaaaatattgtttgtttggggattgttttttgttgtggttgtaggtttgtttaggaagaggagttgaaaagaggtaagttagggaaatagaaatagcggagtatattgtagtgggaatcgtattgcgtattttttcgagtttttttttttataagttatttatgggaggtagttagtgaatatttagtaattaaggaaatatgagaaataggaaagtttagggtttattatgtaatttaggtttagtgatgtatgaggttagtgtttttatttgtaatagaagtaaaatgattaaaagataatgatttgattttttgttgtttattttttagtgatttggttagggaagaagaagaaaaaagtgagtagtatagttatttttgtttttaaggttgagagttgaggtttattgagatttgttggcgtgaataattttttatgatttttaaaaatgtggtgatttatttgttggtgatttttgtgttgttggtgattttttatgtgttagggaggttgttttgtgtgttttagaaagtgtttttattttaaattttttatgttcgtgaaatatttgtttttttgtttggttgttaatagaatgaaattatattgattaattattagaatggattttttttttttatagtgaatgtgatattggttttaaatatagtttatttgagattgattttttttgaatagaataagcgtgtgatttatggatatttaggtagttagatattttatagagatttgattatttgttttatgggttagagggaatttttgttagggagttggtattgagaggtggagattgggaatagggcgcgatgggtttcggaggttgttaagtatatgttgtaaagaaagagttatttttgtgttatttgatagtgagttttaggtaatggattgtaaaagaaatgagttttgggttatttttttttttttaagttttatttttttgaaggtggtttttgaataagttagaatttttttgatcgtgtttttgaatatttttttttttataatatgattggtaagtgttttatttatattttttttaaaatttttttttttgggattttgtatttcgttttattttttggttttttaatgtaggttttttggatattttttttgtatttataagaatatttttaacgtattaggaaaataataatttgggattttggaaattagaatgatattttgagttttgattattttttatttttttaattgtttgaagggggttgttatgattattgaagtattaatttaaggtgttttaattttatttaggaaaatttgttggagattgatttttttagagatttattttgttttaggttttttgagattcggtttattaattataatttgatatttgataattaaggatttttagaaaattttatgggaaatataatttagtttataggaagaaatgaaaggaataattaaggatttggttagttttttttttttttttttttttttttttttttttttttttttttgagataaagttttattttgttatttaggttggagtgtagtggtatgattttagttgattgtaatttttgtttttcgggtttaagtaatttttttgttttagttttatgagtagttgggattataggtatgtgttattatgtttagtttatttttgtatttttagtagagatggggttttattttgttggttaggttggttttaaatttttggttttaaatgatttattcgtttcggttttttaaagtgttggaattataggtatgagttattatatttggtttgattagtttatttaagatggtgataattaattgtttatataggtggaattgagaaaataaaaaatatatatatatagttaaaaaaaagtgaaagaaaatatagttgtataagggggagaaaaatttgattattaaaatataattttgaaaattttatgaagtgttgtaaaattttttttttagattttttgagaaagttgatataggaaattgagttaggaaaaaaattttagatttttcgatttaagcgaaaaattatgtattatttatacgaatatgttaattttattgttagagtaaaataaagtgtataatttaaaattaataattataaaataaataaatataagtagtatatgtaatatagtaaaaatattttaaagttataatgagtttaagaagataaattatatgtggaagatagaagaatgttaataagatttttggaaagaatgttatgaagtgagaagacgaggatttgttagtgacgttttgttgttttttaggatggtagacgttagaggtatcgcggttttatgcggattatttatgaatagtattttgaatttgtttttttgggttattatttttttttttatttttaaatttataaatttaaatatataaatgttagaaattatatattatttttttataaatgtttatatattaattttaataaatattttttttaattgtggtaaaatatataatataaaataaaattttttaattattttaaagtgtatagttttgtggtattgtatatgtgatattgttgtgtgattattattattattttttagttttagaatatttttatcgttttaaacgaaattttatatttattaagtagttattatttattttttattttttattttttaggtaatttattttttgtttttatgaatttttttattttgaatattttatataaatggaattataaattatttgtgtatgtgtatgtgtatgtggttttttttttttagtttaatatttttagagtttttttatgttatagtatgtattagtgttttttttttttttaaaaaaaaaattaatagatattatttttaagaatagttttagatttataataaaataaaatggaaaatttagagagtttttagatttttttttttttttttttatttttgttattattaatattttatattagtgtggtatatttgttataatttatgaaagaatagtgatatattatttttaattaaagtttatagttttatattaggtttattttttgtttatataatttttggagtttaataaatgatttttatatttatattgatttatttttatatttatgaagatttaaatttattagtaaatatattaggtttatttgaaaatattttaatattattttgatttaatgtaattaaaaataatttattgtataatatttaaaggttaattattattttttatttatttttgagtttttttttttagtgaatgtagttttttgtttgttagtttgtgtttgtgaaggttttatgaatatatatatttattttttagggagaaagttttaagaaaattggttttattagttatatttttttattgtatattagaaaatatatttttttatagttttttaaattggtgattaatgtattttttgagttttagttttagttagaaaagttataggaaggagaggggttggtggcgttgaggatgatgttttagttattggaagtttttgtggttgttgggtgggtaatcgggttggtgttttaggatatagtttttttcgtttttggtgtgtagatagttgggtgtagttattaaagtggggttatttttagaataaatgtgtagattggttggattttagttttagggagaggataggaggaagttatagagattgaattgttaattttttgatattttttttttttgttagtataatttaatttttatgaggatagtgattttttttttttttgtttagttttataatttgtaaaaatgatatatattgattattaataaatatttgtaaaatgtatgaattgttttataaagtgatatttattgaatattttatttgttgaatgtattatgttaaggtttagagatataatttttaataagatataatttttgtttttaggttttttttttttgtagtggagttattttgtttttggaatgttttattatatttttataaattttattaaaaatgggagtgttagagtagtttagtaataaagaattaattgatgtagttaggtggtgaatttatttttttagaaaggataggttatttggagattttgtattatttattgatttatttaaagttataaatgaaaataagatggatattgttatttttgataggtttaaagttttgagtttaattaattatttatttttacgttttttattatgtttatttgtagttattgttttttaatttttaagtttagaaggataaatatttattaaaatgagtaaagaagtgataagtttaagaattttgttgtagaaaaaatatgaatttagattttgaaaaagagatagtaaaaattttttttgaattttatgttgaatgttttaagtgtataaaaaagtaaaatgtttaaggttgaatttgttatatttcgtgttttatattatagttttattttatttgtttttgttttgttgttatttttatgtttagggttcgtatgtttagaaatttttttttatttattatgtttatttgattataattattaatattttattattatttatttatttttgttttgttttgattattttttgatgaaatatgtaagtttttttttagggttagtgaaattaggattaggttttggtttgattttttttggtttcgaatattgtttttgttatttagtgtgtgacgtgaaattttattaaggagatatatttataggatagattgttagaggtatttgtggtttatagatttgtaaatattgtagaagaaaaattaaggggattttttttattattaggaagaaagggtttatttaatagaagaagttcggttaggtgcggtggtttacgtttgtaattttaatattttttgaggataaggcgggtggattataaggtaaagagatggagattatttgggttaatacggtgaaatttttttttttatattaaaaatataaaaattgtggtttttaggtttatttatgtttttataaaggatatgaatttatttttttttatggttgcgtgggaattgaataatgagaatatttggatatagggcggggaatattatatattagggtttgtcgtggggtgggaggagcggggagggatagtattaggagaaatatttaatttaaatgatgagttgatgggtgtagtaaattaatatggtatatgtatatatgtgtaataaatttgtacgttgtgtatatgtattttagaatttaaagtattaaaaaaaatataaaaattagttgggcgtggtggtatatgtttatagttttagttatttaggaggttgaggtaggagaatcgtttgaatttgggaggtgtaggttatagtgagtagagatggtgttatagtattttagtttggtgatagagcgagatttcgttaaagaaaaaataaataaataaataaaaatatataaataaataaaaagtaggagaagtttatattttatatttttgaagataatttgatgataaatagttggagaagttttatatgtagtaaggataagggaaatttttaatagtgggtagaataggttaggaagaaaaagaatgttaatgttagtaatgatttttggtatagatgtttttttatttttattttattgtttttttttttaaagtataaattgtaatattgattttttttttatttatatttttatataggatataattttggatttgttgattagtgagaatttattaaagaaaagggttttttttttttagaaggtttgggttttttttttaattatttataattatttatgagtttttttcgttttttgttaaagtttaagattagtagttgattgtatattagagtttgaagagtaaatacgttgagttattaaaggatttggatagatttttatgtatttttaatagtggtaatggaagtgagaatttattttattgtaatatttttttttaaacgtttttttttttttatatttgataataaaaatagtaagaagagatttttttgtaaatgtagttttaaaattatatattttaatatatatttagtatgaaaatagatgagaaatttatgaatttgtttggagtttttttgtgagaaatagttgttgtttataaagagattgtatttttttaatagtagtatcggaggaaatttttttggatattttttagtttttttattttattttttgtttttttttttttgatagaaagtgaaattatatttagtgaaattgatttatttattatttaaggatagtttttttggtgaatgtatttagaagatgttttagtggagatagtagaggtgttaatatttcgttgtttattatgttaatagaatattagttttttgggtaatatttttattataattcgttaaagaagttataggggtaattggaaaagaattaggataatttttatgatgatttaagtagaaggttatagatgtgttagtattttgaaggttagaataaggatggaaaattttatagaaggtgattttagtaagagaatagatgtgggattaatcgatttcgttgtgaaaagatacgtttttagttttgttgttttggaaattttttagggggatagggaggtttttgatagagtttttgggtaggaagtgagagttatgatttttttttttttatatgttattatgtagaaatttttttttggattttttataaattattattttttttttattgtgttgaataaatatttagagtttatttcgtttttggtttaatttttgtttttattatttatttttattttttagtaatgtttgttttttttgtggtaaagtaatgttttttttgtggtaaatttagaatattgaagatggttttggattttttttgtttttggtgtgtgggggtattttagttcggggaatatttttcgttgaagaagtgtattttttatttttagatcggatgaggttgggatgagttgtatttggatttagagaaatagttattgtatgtatagttggaaaaaaaaaaaaaaaaaaggaggaaagttgtaaatattgggaaggtagaatggagaaaaataagagggagaaaattggaaggttaggtaaaattgtgtttcgttttaggagatatacgatgtgtaagttttagaaggttagggttgggtaagatttttagtaattatttattttagttaggttaggattgtttagttaggatggttgttatatttgaaagtgttttagggtaaggtttttaggatggggttttgtttattttttaaacgtttgttacgttattgtttgtttttaaaattaagttttatagtatttttagttatggtgtgtttatttttatttaagtttttttatttttattttttgtgggtttatgtaataattgggttatttattttttatatatttttatttttagtgattgaaattttaggttttgtagttaaaaagatttgaattttgataattgttttttttttagtagttttgattttggtgacgttattttgttttttttaggtatatttaatttttataataatgtaaataattatggtatttagtataggattattgtgagaaataaatgagatagcgtatagggaatttaatattatgatttttttgtgatgaatatttggtttattttagtttttaatatttatagtaatattaatagtagaggtgatagtagtaatagtattaatattggtagtaattaattttttttttaaattaaatatttttagtaattaaaattttttttataagaatttgtatttgtaaattagattttttttttttttttttttttttttttttttttttttttttttttttttttttttttttttttttttttttttttttttttttttttttttttttttttttatagtttttttttggattgtgttgttgttatttcggtttattgtaatttttttgtttgatttttttgttttagtttgtttagtgtttgttattgtaggcgcgcgtcgttacgtttgacgggttttcgtatttttttggtggagacggagtttcgttgtgttggtcgggttggtttttagtttttaatcgcgagtgattcgttagtttcggtttttcgaggtgtcgggattgtagacggagtttcgttaatttagtgtttaatggtgtttaggttggagtgtagtggcgtgatttcggttggttataatttttattttttagtcgtttgttttggttttttaaagtgtcgagattgtagtttttgttcggtcgttatttcgtttgggaagtgaggtgcgtttttgtttggtcgtttatcgtttgggatgtgaggagtttttttgtttggttgtttagtttggaaaatgaggagcgtttttgttcggtcgttattttatttaggaagtgaggagcgttttttttcggttattattttatttaggaagtgaggagcgtttttgttcggtcgtttatcgtttgagatgtggggagcgtttttgtttcgtcgtttcgtttgggaggtgaggagcgtttttgttcggtcgttttatttgagaagtgaggaattttttcgttcggttgttatttcgtttgggaagtgaggagcgttttcgttcggtagttattttattcggaagggaggtgggggggttagttttttttcggttagttatttcgttcgggaggtgaggggcgtttttgttcggtcgtttttattgggaagtgaggagtttttttgttcggttagtcgtttcgttcgggagggaggtgggggggttagtttttcgttcggttagtcgtttcgttcgggagggaggtgggggagttagtttttcgtttggttagtcgtttagttcgggagggaggtgggggggttagtttttcgttaggcgagacgtttcgttcgggagggaggtggggggttagtttttcgttcggttagtcgtttcgtttaggagggaggtgggggggttagtttttcgttcggttagttattcggttcgggagttgaggggcgtttttgtttggtcgtttttattgggaagtgaggagtttttttgttcggttagtcgtttcgttcgggagggaggtgggggggttagtttttcgttcggttagttgttttattcgggagggaggtggggggttagtttttcgttcggttagtcgcgtcgttcgggaggtgaggggcgtttttgttcggtcgtttttattgggaagtgaggagtttttttgttcggttattatttcgtttgggaggtgtatttaatagtttattgagaacgggttatgatgataatggcggttttgtggaatagaaagaggggaaaggtggggaaaagattgagaaatcggatggttgtcgcgtttgtgtagaaagaagtagatatgggagattttttattttgttttgtattaagaaaaattttgttttgggattttgttgatttgtgattttatttttaattttgtgttttttgagatatgtgttgtgtttatttagggttgaatggattaagggcggtgtaagatgtgttttgttaaatagatgtttgaaggtagtatgttcgttaagagttattattattttttaattttaagtatttagggatataaatattgcggaaggtcgtagggttttttgtttaggaaaattagagatttttgtttatttgtttatttgttgattttttttttattattgttttgtgattttgttaaatttttttttgcgagaaatatttaagaatgattaattaaaaaaaaaaagaaaaagaaattgtttttgttaggattaaaggttgagaaagtaaggagaatatagagtttttttttataacggtaggaaggtattaaatttgaatagagtaaggtttttagtgttattgtttaaaaggattgagatgagtagtataggtaagttttgttttaggttttagattataattttagtaatatagtatagtgagaatatttttattttttttggataagttttgtttttttatcgataggttatataaaggaaatttaattttttatttattagtaaagatttttaggaaaagggaggaaaattttttgtttttttttaaatgttgttaaaagatttaaagttttttatttttttgattttttttattttagatttatgagatagagtatattatgtatagggttaaggtatttgaattaagagatgataagaaagaggggtacggtagaaataagtaatagttttgttagtatatagtgttttaagtttttattttttgattttttttttttttattattgatatttgattgatgttaggtaaataggtagaataaggggaattggtatgtgtgagggtaaaaattttatatggaaattattagatttttataatgggataagtgtttatgaattagtaatgaaattataagttaggataatgttttgatgagaaatgttttagaaatagtaattagatttcggtattagaagggatggggatttatggtgagggtttaggtaggtatttttgtgttttaaatatttaatataattgaattgagagaaagttatgtattaagggtaaagttgttgtatttaaagaagaattattaggatttagtttaggtttgtattttgggaattattgtagtaagtgagtaattataatttagagagaagttatatttatgatagatttttagtgaattaattatttattattggtaataaattatttggaaatttagtggtttaaaataataattgtatattattttataggttaggaattttggagtagtttagttgggtagttttggtttagttttttataggttgtagtgaagttattggttggggttgtagttatttgaatttttgattggggttgggggtttttttataagaaggtttattatatggttgttgattgaaggttttagttttttattaataggtttttttatcgagttatttgagtgtttttaagatttggtagttgattttttttagaatagatgatgagagagagagaagaggggagggaagtgggggagaagaaggaagattttaatgtttttatgatttaatataggaagtaatatattataatttttgttgttgttaattggttatatagattatttttgttatagtgtgagggattatgtaagagtgtgattgttagtagagagaatggtgtagggttttgatatatggtttttaatttggttgaatcgattatttatagaggatagtgttttttgtttgtttaattttgtttatttatttttttatttttattttgtttttagatagagggaggttggtgtggtgatttaagtttgtaattttaatagtcgagtattttcgaaggttaagatgggagggtagtttaaggataggaatttgagattagtttgggtaatatagtgaggttttatttttatatatattaaaaaattagttgagtttggtggtatatgtttgtagttttagttatttaggaggttgaagtaggaggataaggattgtttgagtttgggagatagaggttgtagttagttatgtttgtattattgtattttagtttgggtgatagagagagattttgtttttttttttaaaaaaataaaaagagagatatatggattggtatttttttttggagagatagtaattatgtttttttgatataggatttttttttttttttttggataaaggatattttgttaatttaaaagattaggaaagatagggttggtagttttatttattatatttattattataggtttatttgattataggtttaattaattttaaggatattgggtttatagaagagaatgatgtgaaagaggacgttaggataatttttgatttttagaggggagggtatagtttttttttttatatttgcgaagtaggattttttaaagatatgagattgaaaaaaattgtggatgtgagaagatataaattttattaggatgatgaaaaatatttttttttttttattttaaatttatattattagtgttataaagtaagttagggtttgttttttttttaatttagtagttttaaaaggtttaagaagattaggtttgaatttttatttttaaatttaaaattttgtaattttttttttttaaatgattgaagtataatttatagataagtatttttataagtatagattataagtattaataattgaatatatttaagtaatttatattttaatttaaataaagaatattaattttttataggtaattagtagtttgatttttattattaaagtttagttttgtttttttattaattttatatggtaataatatattatttgttttgttgtatttaattttttttatttaatataatgttgagattatgtatattgttgtgtatgtttttttaatattttaagttgaattttattttatgaatatgttttagttttttttatttatttttttgttgatggatatttggatgtttttaggtttgggttattattaataaaattgttatgaatatttttttttaagtttattgtggatatatattttattttttttatattttttattttatatataatgtttgggttaaagagtaggtatgtgtttaattttataaaatattataaattagttttttaaagtggttgtattattttatatttaaataagtaatgtatgagagttttagtgattttatataattaataattgatatttttagttttttaaattatatttaggttagtgagtgtaaagtaataatttattttggtttgtatttttttgatgattatgttgaattttttagttatttatttttatttatgaaatatttatttaaatttttgttttattttgttgtattatttaatatttttatgaagttgaagaaattttttaaatagtttagatataatatttttgttaggtttttttttttatgtaggtatttttaaatttttatttgaagggttttgtagtttttagtgtaggtattttgtatatattttgttaattatatttttaagaattttatattatttgattttattgtaagtgatatatttattttttaaatgttaattattaatgtatggaaataaaatttatttttattattaattttgtatattgagattttgttaaaatttttgattaattattttagaagtttggtggttttatagattttattcgattatttaagtatttaagtatattatgtgtgaatgataatattgtgttttttttttttaatttttattatttttaattaattaattattttgttttatttttttggttaggttttttttattattggaagtattaatagaggatattttttttttgttttcgattttaggggtaaagtgagtaatataatattattgtttttgatgttagtttttgatttttttttggtattatttagtagatttagaaaatttttttttatttttatattgttagaggatattgttgttgttgttgttttatttttaaaattatgagtggatattaatttttattttaaaatgtttgtgttatttaagattatatagtttttatttttttgtttttaattttgtttttgttttatattaggtatataattttataattgtattaatgtattataaaatttatatttttaagattaaattatatttaattatatgtattttttattagatttattttattgttttaattagaatttttgtatttgtgtaaataattttgtaggttttttttttatttttttgataagtgtattttgatgtataaaagtttttaatttttacgaagtttaatttatgtaattttttttttgtggtttgtgtttttggtgttattttaaagaagttattatttaatttaaagttatgaagattttttttttgtttttttttaagagttttatagttttattatttaaatttaggtttttggtttaatttgattgaatttgtatatggtttaaagtaagaatttaattttattttttttgtatgtgggtgtttaatttttttaatattatttgttaaagattatcgtttttttattgaatggttttggtattcgtggtaaatgaattgagagtttatttttggttttttaatgtttttttatttgtttttgtatttttttttatattagtgttgtatgtgtttttgattattgtaattttgtattaagttttgaaattggggagtgagagttttgtaaatttgttttttgttttttaagattgttttggttatttgaggtttttttatgttttatatgaattttaagagagatttttttatttttatttaaaaaataatgttattaagattttggtaaggaattatattgaatttttttattatattggataatattgttattttagtaatattaagttttttaatttatggttgtaggaagttttttaaataaagaggtatatttatatttatataggtttgtttttaatatttatataattttatatgttttattggtatataaataaatttgatttatatttaatatttttttttataatagaaaataatatatatatttatgaggtataatattaagttttgatagatatatgtattttaaaattatttatatattttatatatagtatatatattatgtataatataatgtatattatatattatatatatttatagattataaatatatatattaatatgtaattatatataaataatatataattatatatttatagatatatataattatatataaatatataaaagtataaaaataaatttatatattatatatagtggaattattaaattaagttatatagtgaatgattgaattaaattgattaatataattattattttatatgtttattaattttttttggttaatagattgaaatttttttttcgtaatttgtaaaatatatattattattagtaatatattttaaaaatatattgtttttgtgtaattgaaattttgtattttttgattaatatttttttattttttttatattcgttttatttttttagtttgtaattattattttgttttttatttttatgagtttgattttttagattttatgtataagtgagattatagtatttgtttttttgtgtttggttattttatttagaataaaaagaattagattgtatttagtttagttaattttttgattttaggtatagaaataataaaaattaaataaattttatgtgtgtgtttattatttatttatttatttatttatttattaaatgtttatttaaatattatttttgatattgttatggaggattattatttatattatgataatttagtagattggtttagggaatagataaatattggtgttattatataatttataaatgtagtttttaaagaaaatgttaaagtatgtggtttaatttgtaaagtatatatttttatttcgaatttttaaatgtaatatgtttgtttttttaatagtattattttgtttttaaatattgtttaaggagttaatatgttataaaagttttgtagtaagtaaataaaataaaataaaatatgtatttatttttattttaaaaattatatatgtttttttatttatagagagttatagttatatttggatatttataagataaagtttttttatatttaatttatatattttgaattttttaaaaagatgtatttttaggtagtgtgtaattttgatgataatgtgaattgtattttttttttaaattgtatgttttttttatttttgttttataaaaatgtgttggtttttggatattatttttgtatttaataattttggtaaatttattaattttaaaaatttagttgtagtattttttgtaatttttaaatatataataatgttaattgtatatgatagttttatttgttttagtttaatatttgttgaaagtttttatttttgatatatatttttttgttagagtttgttattgtaatattaagatattttatatttttgttattttagaagttaagaaataaaattagagttaaaatttgttaattggttggatttagtaatttagagaggggatagattttttttgttagattttatttaagttacgtaggtttgagatatagattttggaatttgagggaaagaaaaatgtgtttgtagatataaaatatggatttaaaaaaattattagggaaagaaaatgtttatggtaaagggtttaagattagaatttattacgtttagcgaagttgtatttttatttaagaagtttttatttaaataattgttttttagaagttttttgttaattaataaatagttgtataattagatattatttttttttttgataattatttttatttaattttatttttgtttatttttttttttttttttagtttttagatattgttttaggtgtatttttagattttttaattttggtttgtatgaaattttatatttatatttatgttttttttaatgtttaggtattggtaatttttggtagttatttttttatttttagtggggaaaatattgttataaatttaaatgtattttattattttagtagtttataaattagataaaggtattgttaatgattgtttggataatttttaatagtagtttttttgtttttttttttttttttattattgtttttttttaatatagtagtaaaattgttttatgtttttatgtagatataggtaaaaacgtgttatttgtttatataatgatttattttatttttttattttatttaagttaaaattaaagttttgttagtagtttattagatgttataattttttttgaggcggggttttgttttgttgtttaggttggagtatagtggaataattatagtttattgtagttttaattttttgggattaaagggtttttttttgttttagttttttgagtaattggattataggtgtatgttattatgtttggttaatttttttattattttgtagagacggggttttgttatttttttttagttggttttgaatttttaggtttaaggggtttttttattttggttttttaaagtgttgggattataggtatgagttattatgtttggttgatttattatttttttaatttatttttttattgttgtttttttggattagtttatattagtgatattggttattttatattttttgaaaatattagatatatttttattttacggtttttgttgtagttgttttttttgtttggaaaattttttatttagaaatttatttagatgtttattttattttttttaagtattgtttttttatagaggtatatttaggataatttatttaaatcgaaattttattgtagttgttagtagtttttttttattgatttgtttttttattttttatagtagttattattttttaagatattgaaatgggaaaggtttttttgttttttttatagggtttgtaatagcgggagtggtttatttttttagtgttttgttgtttaaatttttagggagagtatatagacggataggatgtggggttttggttttacggtagtatttaggggtgtatgtttatagtttttgaagttttagtgggtatgtgttattgtgtgtttttttagttttgttatgtataggtagttagtgttaattagtttaattagattttttgttttattgtaaggatagagggttttttgtattttaggtttttattttggtgtattagaaaaattagattatatgtgggtttgaagaatgagagtaaggttttattgagtggaagtggtttttagtagatgggggagttagaagggagatggagtgggaaggtggtttttttttggagttaggttgtttagtagttgggtttttttttaattgttttggttaaattttattttgtttcgttggttaatggtttgttagcgtgttagtatttgttggtttttgttggtatgatttttaatcgatgtgttttttttgatatttagttatttgtgtgtttttttattgatgtgttttttttgacgtttagtcgtttttgtttttgtttgttagggttttaggatttttataggtataggatgggggtatggtaggttagggtggttttgggaaatgtaatatttgggtatgaaggtaggagtgtttgtttttatttaggtttgtgggtataggtttaggggtggagttttagttagggattatgttttttttttattagtatttttttgttttttttttatattattttttttgtttgaagaggtacgtttaattgttgttcgaatatggatgatgatgggttttagttgttttttgttgataggggtatcgttttggggaaaacggtagttagattttttttagaggtttatataagggtttttagtaaaggggagttattatttaaggtttcggttttttgattatttggaggttgatggtttttaggtgtgagagaaaaaataagttttataaggttaagtatgtatggattatatatatttgggtatgtatatttaagttatatatattgtaattatatatatatatattatatatattataataaatacgtgtattatataaggaaaaaaaattagtgttaaagattatagagataagaagtgaaatatattaataataatattgtattttgagatgttttattttggtgaaagaaattaaattttgtatgggagtggataaatttttagaatgagataattgttttggttatatttttagtagttaataggtgtattttgggaattttggggtttgtgggtttgtttggtggttattaaagtttttgttttttttttgtatttttttttttttttttgggtttttttgtttgtattataaaagattaaggtggttatttttagaaggttttttaatgtattattcggttttagggttcgtttttgtaatttttttttgaggttaggagttgtttgagtaataaatttattttttagggttagttgtttttttattgaattaggagatagataggtatgttttattaaggttttttttagtttttttaggaaggtagtaggatttttattaaatatttcgtcgattatggataatttagtataattgagaggtttggttttagttttataaaagttttttattatgtatatttgaaagcgtttttttttttagttttttatttgttattgggattttatttagggttatttatttttattgttttttttttagttggataatgtttgtttttttttttgatgttatatgtgatataaagtttatttttaaatttttttattgtttgtagagcggtttgttttttagtgtttattagggtttgatttaaaagtagtataatatttttttaggagagtttaaatatatgggtgaaagtttggaaaatttttatatatttataagggttatttgaaagtttgttaagattttttttggtttgttttaaattttgtaggaagaaggtgatttggattttattgggcgtaaatttattgggtatttgttggaggggtaaaagtgagattggttgaatgttgaaggtgtattttaatatatatatatatatatatatatatatagagttttttggtatagattagtatagtgtttgttttggttttaggtattgtttttgtttaattattagttaatgattaagttaatcgggtagaaatattaaacgttatatttaggaaagaatggagattttataaaattagattagaaaaatttttaaataaataaataaataagtagtaatataataaatgtaataatagtaaattttgtagagggaggaaatttggtttttaaattgtaatattataatatttaaaatgtttagattttagtaaaaaataatgaagtatgtaaagagaaaagaaattatgatttatgtatagaaaataataaaaagaaattgtttttgaagaagtttagatattgtaattagtagaataagatatgtttaaaaaataaagtataagaatgatgttttagtaatttgagaatattagaaggagaaattatagaaataaatagtaattttgtaggttaaaaatattgatttgtaaggttttcgttgagaagtttggtaatggatttatgggagattttttatatatgatgttttttttagaattttttttttgtgtttgatttttgataatttgattataatatattttggagtatgttttttttgaattgaatttgtttgggatgttttgatcgtttttaattcggatgtttatattttttttaagatttggaaaatttttagataatattttattgattaagtttattgtttttttttttttttttttttttggtatttttataatttatatatttgtatgtttgatggtgttttataagtatgtataaaatatttatggaaaaataattttaataattttgagattatttttggtaggtggagtattttaaaattagaagttattatttttttttttaagtgattgattttttaatttagaaattattattataggatgtatagaagattgaaataaaatgtggttttgtgaatatagtgtgggttttggagttagaaattttgttatttgttggttgggtaatttttagtgtttttttttattttaaagaattttatcgtatagtttattagggattaaataagtttgtgtttataaggtatttattatagaattttgtagttaatagatatttaataaaatatgttattatttttttttgttttttatagtggtttatgagattttatttattggtttattttttttagtattatagatttttggattggatttttttttgttatttaattttaataatttgattttttttgtttatttttatttgttttaaggtttttttttttttaatttttagttttaagggtatatgtatgtaattgtttgttatatgggtaaattgtgtgttgtgggggtttggtgtatagattttttagttatttgggtaataagtataaaatttaagagatatgttgtttttttttttttagtttttatttttaagtaggttttagtgtttgttgttttttttttagtgtttatgtgtttttgttgtttagtttttatttataagtgagaatatatggtatttggttttttgtttttgttttagtttgtttagaatagtggtttttatttttatttatgttgttgtaaaggatattattttattattttttatggttgtgtagtattttacggtgtatatttattatattttttttatttagtttgtttttttttaaatatagttattttttttatttttaattattaaatatttataaaatgtttattttgtggaaggttttttgttttaagagttataaatattaggttgggtacggtggtttacgtttgtaattttagtattttggaaggttaaggcgggtggattatttgaggtagggagtttgatattagtttgatcgatatggagaaattttatttttattaaaaatataaaattagttgggtgtggtgatatatgtttgtaattttagttatttgggaggttgaggtaggagaattgtttaaatttaggaagtggaggttgtagtgagtcgaaatggtgttattgttttttagtttgggtaataagagtgaaattttatttttaaaaaaaattaaaaaaaagagttataaagattaatgatatataatttttggttttaaaaatttttgaaaaattagaaataattttaaagtttagaaagagtgagtttttttttagtattttatataagtttaaggttttttaaagtattattaaatttttttagttttttgattttttgtttttttttttgttttattaatgttttaagtttttgttatgatatagattttagaatttttataggttatatttttattatttgtttaggtttgattaatttgttttacgtaattttttagtgattttttgtatttttgtttataagggtttttttgatatttaagtttatattgtttagaaatagtgaatttgagtttttcgttttattttgatttttttttgataaagaaatttagatgatgcgagatttgatgaagataatatatggaaaatgatagttttgggtatggattaattttttttttgaggtttttttaattttagtagtttaggagtttttttttagggatttagggattttaatataattgttttattttttttgtttgttttttttttaaatttaatatttttttttttatttttattgatttttttggaagtttgggggaaataatttatagttaattaagttttaggttgatagtgttggttttttttttggtttttagagtttaaattgaataaagaaaataattatttttcgtagtattaggaaaaattttttagtttattattttattttttgtagtatggttattttatataatttgttttaatttagaaataatgatttttttttattttttttattaatagggtggattattttttaatcgttttatagatagggtattttagatattaaaggaagaaaaggaatatatagtagtattgagtatattatttagttattttttttttttcgatgagttatttaatattagaaaaaaaaatttatataatagagggtatattgattatttgttgtttattttagaggtatattagaagaaaatttttaaaagttgatttggtaggagaatttttttataggattaaatatttagaagatttagtagataaatgtttaatttgttttggttggaggtgtgttattatattttgagatggatttatttattgttcgtttgaagtagttttaatgtgggtgtaatttatttttttagttttttagagtttaatattttttagagtttttatttttataggtagttttatggttgttttttttttttttttttttttttttttttttttttttttttttttttttttttttttcgattttttatagttattgttttttataattatatgatattgtttaagattttttttttttatgattgtaagattttattttatattaattgaatgtagattaatgatatataaataaatataagttaagtaattttagtatattttattttattaattataataataaatttcgtaaatatttattttattattaggaggttggtaagtgatgattgaaaggtttttttgtgataagaaatttttgttttttgttgtggtttttattaataaaattatttttagttagtattttttagttaaggtgttgaaagttttttgattatttattaataaaaatgttttgagtatgtattgtttataaaagtatatttataaattttatttatagttatatatatatatatatatatatagaaaattttgtaattttaaaggtatgagttaaaattatatagaaaatagaagttttaatattttttttatattttagtggatagtttcgtagattattgattttttttaatattttttttgtttggggagtaaagggtttaattgaggaggaaatttgttagatttttaattttaaattaagggtatatagtatttgaggtttttagtatacgattaaagaattaaaaatgggtaggggcgggaatgtgaggatagtaatatgcggtaaataaaagaataaaggagttgaagtagtagaaaggggaaagaaaaaaaagtttatttggtggatagtaagaggtgattagaagttgtttttggtaattttttggtttaaataagtatgtttataggtgagtttttgtttttagaaataattttggttgttattttgattttattgggatttgttattttggttattttgttaataagatgggtacgacgtaagtaaagtggtgagtaataatgagttaaaatgaagattttttgtgaaaattatggagggagggatgttaagatttagtttgagtttattttatttattaaatagttagagattttgttaatattttgggaatttgttttaatatttgagttaaagaatttttgatttattagtgattgtttttgtatttttaatttttaaggtttatattattaataatgttaaagaaaaagttatagataggtcgggagcggtggtttacgtttgtaattttagtattttgggaggtcgaggcgggcggattataaggttaggagtttaagattagtttgattaaaatggtgaaattttgttttttttaaaaatataaaaattagttgggtatggtggtaggtaattgtaagtttagtcgttcgggagattgaggtaggagaattgtttgaatttaggagacggaggttgtagtgagtcgagattacgttattgtattttagtttgggtgatagtgtaagattttattttaaaaaaaaaaaaaaaaaaaaaaaaaaaattatagagtttagtaaaagtaataagaatattttaaaagaaaattatttgagttttaagggaaattatttgatagaagtgagaagatagtatgttgttaaatattagtatttagtattatataaaaagaattggagatttttagtgatttaatttggggagatgataagaagagataaatatagagtagtatttgtcgatgaaatagagatggagtttataaaagttaagatttatttttatgttataaggttttttttttttggatttttttgttttttttttataattttttaattagttgtattttttttttgttttttatttttaatgtttgtgagtttttaaagtataagtagtgtgaaaagataggtaaaatagggttgatgggagatgtggaaaatgggtgagaataataatgtattatattaggaggattattttggtaagtaagaagtatagtttagagtgagaagagtttgattagaggaagaatattttttttaagtaattaataaaaatattttgtttaatttttttatagaaatgtatatttttagatatagtttagaataaagtaagtatttatatttatgagaaaaataaatatagtatttatagaatttttataagttaggaatgaaatttgttttgtttatagttgtgtttttagaattttgtatagtgtattattgtatgaattgaattgtttttaagtgagtgggagaaatttattagagatttttgagtagtattgaatgttaaattggatttggggagaattaattaatattgggtaggtttgtataattttgaggttttttttagatgttttttgtggtttgagagtagtaatagagaattgttttagtttaggtattggaatagatggtttagtaaaaagtttaaatttatttatgaagacggttttagtgaagtggtcggatcgaaaaatataatgtattttagaataatgagagtgaatatagttagggtaattatgattgagaagagtattaattttaggatgtgaagaattgaagaagattttttatggaaaggtttggagagatgttaaagttgttaagaaagatagtataggattggtatgaggtaaaaattaggagattagttgttgaagtattaagaggtaaaagaaattttgaaattttttttgattattatttagtttggttaatattataaaattggtgattgatatagttatttattatcgttagtttttgtagtttatgtataatttttagtttttgtaaagtaaattaatttatattattatttattattaggagtttatgtttatattagtttttagagttttaaataaagttttattaataattaagaagtaaaattatgtgttttttttttttttttaggtgttagatttttggattatgaggatggtagaggtaaatagattaggaattattagatagttaatgaaggaatatattttttagagtgtgaattaatttatttttatttgagtatgatttgttgagttagtatatttttcgtttttataatatttaaatgtttattattttttttttttttttttaagaaaaattgtgtattttttttagaaaaggtaaataatttttttttttaagattattaaaagaatttatttttattttttgtttatttttaagatattagaaaggttaaggaatcgtttcgaaataattttttggatgtttaaaatgtggataaaatgaatatgaaatggaatagtatatgtgaaaatatattttgaaagttatatagtagaagaggtaaataaagtttatttttatttaagaagatgaaatttatgtttaaaagattgagatttatttaagtttatttagttgaggagggagttggatattaaatttaggttttgaaacgtgagagttatgagaagatggtaatgcgttgtttatttttttgaagggatatattagtattattaattttaatgtattatggttatttttaatttttacgttttaatatttaatgtttttttttagtatttatttattagggttgtttatagatgttttttcggttgtttttttttttttttttttttttttttttttttttttttttttttttttttttttttttttttttttttttttttttgattagttttatttttagaatttaataagaattattagagttattttttatttttgttggaagttattaaagttgtttatattaggtttattagttatattagaattataaggttatgagattgtggatgtggaaataattatatatatatatatatatatatacgttataagtatatagatttttgagagttgaggaaagaaaagagaaagtaatttagttatttcgtttgttgtttatgttttatatttggatttttggtttattttttttttttttatttttatgatttatttattatgaataataagagtgaagagtatagtgttatggtattttttttttattttttgaaatggaatttaaagaaaatgggaatatttgggaaattagtaaattttttagtagttggattgagattaatgataaatttttttttttttttttttttttttttttgagacggagtttcgtattgtcgtttaggttggagtgtagtggcgtaatttcggtttattgtaagtttcgtttttcgggtttacgttattttttttttttagttttttgagtagtgattataggtatttgttattacgttcggttaatttttttgtgtgtttttagtagagacggggttttatcgtgttagttaggatggtttcgattttttgatttcgtgatttattcgtttcggttttttaaagtgttgggaatataggcgtgagttattacgttcggttcgataaatttattttttaatgaattgttggtaaagttaatatgttttttttttttttaaaagatttttttttttagagatttaaaagaggaagaggtaaatagatttttatttaataaaaaataatatagatttatttgttgaagtaaaattttattatgtttttatttttttttttaggatttcgatatgtatatttaatataaagtggtaaattattgtattgttaagaaattaatataggagtttgtttatgagaaattaagaattttataatttttttttaattttttagatattttatatgataatcgaggtaagtatatgtagagatttttgtaaaattaaaggaaaattaggtttttttttgttataatataaaaggttataaaaattgattaaaatttaaaaaagaagaagaagaaattaaagtaggtatagaatattttgagaaatgtttataaatgtttattattacgttatgaggtattattttttttaaagttatgtaattttttttttatttaatttttaattatttaataaaagtaatatgagagaaaggtattagtaaaatagtagaataggagttttttttttatatagaagtattaatttagataattatttatagatgagataatattattgtgggagtttaggagtttagtagagaagttttagtacgttgttaggttataaaattttagaatagatgtattaaagagggtaagaagaatagttttattttatttatattattttttttttaaggtggtatagtttaatgttgagatagatttatttggtttataattttttttatagaaaaaatgtgtagaatttaatgagtgtttatattttttagttatttaggatgttgttcgataagtttatttattttttattttatttagaatattgagatgattagtatagttgaatggttaggagaggttgggaatagggaaaagagattgtagaatttatttattagaaagttttattagaaagtttgttatttgagatgcgtgatttatgttttttgtattattgatttataggtacgttttttatatattttatttttttatttaggttgagtttttaaatgagttattatggataataaaaggaaatattttatagttagtttgattttgtaggatcggaaaaaaggatataaatttgagaattttagagtattattttagggaaaataaagggaaggtttttagaatttggattggttttgtaggattgagagaaagtataattttagaaattttatttattttgggtgtggtagtttatgtttgaaattttagtattttgggaggtcgaggtaggaggattttttgagattaggagttcgagattggtttgggtaatatagtgagatttcgtttttaaaaaaaaaaaaaaaattagttggatgtggtggtgtatatttgtagttttagttatttaggaatttgaggtgggaggattgtttgagtttaagagtttgatgttgtagtgagttacgattatgttattgttttattttgggtagtagagtgagatttttttttaaaaaaagggaaaaaattttatttgtgaagtaggtataaataaatattgaatagggtgattgtttttttaaatgtgaaaatataagataagattttaaggttataaaaattaaggaaatatgatattattaaaagaatataataatattttagtaattaatttttaaaaatgaaggtttgtttaaaaattaatttattagttgtttgataaaaaaatttaaaataattgttataagaaagtttagtgagttataagataatataaataatataatgatattaggaaaataatataagaataaaagtagaagtttaataaagagaaaaaaaaataaaatagagttatataaattttggagttgaagggtgtaatgtttaaattaaaataaaaaggaaatagagagtttttaagatgatggattaagtataagaaagaataagagaagttaaagattaattatttaaaattatttagttagagtataaaaaaaaaaaaaattataaagaaaagaaatgaagaaatatgtataagatttatgggatattattaagggagttaattttttgtattattggagttttagaggaaaagagaaataaaatagaataaatgtttatttaaggtataattgttaaaaattttttaaatttgtgaagagatatagatatttcgatatatgaaatttaaaattttttaattgtatttaatttaaagaagatttttttaagatattatgttaaattgttaataattaaagttaaagagagaattttgaaagaagtatattatatttaaaggtatattaaaaggatattagtatttttatgtagatattttttaggttagtatatagtgggatgatatatttaatttgttgaaagaaaaaaattgttaattaataattttttattcgtaaagttgttttttagatttgagaaagagatagtttttattagataaataaaagttgagggagtttattattaatagatttgttttataagaaatgttagagaatgttttttaagttgaaatgaaaggttaataattagtaaaatgaaaatatatttaagtataaaatttattggtaaggtaaatatatagttaatttagaatattttaatattgtaatgatggtatataaataatttttaatgttaatataaaagttaaaagataaaatattaaaagtatataatttgttaatgaatatataatttttttaaatgtaaattttgatattgagaatgtaaaaagtagggagaataatatgtagagtttttgtatgtaatttattttaataatttaagttattattagttttaaatagattgttgaaattatgttttatgtaagtttatggtaattataaattaaaaatttatattagatatataaaatagaaagatattaaagtatattattatagaaaattagtaaattataaagaaagataggaagaaaggaagaaaggatatattaaatagttaaaaaataattaagaaaataattatattaagtttttaattattaataattatttgaacgtaaatggattaaattttttaatgaaaagatatagagtagttaaatgtatttaaaaataagttgtaattatttatgttgtttgtagtagatatattttagttttaaggatatatatagaatgaaagtaaagggatgaaaagaagatgttttatgtaaatggaaaataaaagacggtaggggtggttatatttatattaggtaaaatagatttttagttaaaaattataataagagataaaggagtttattatataattataaagggttaatttattaagaggatataaaaattataagtatatatgtatataatgttagagtatttaaatatataatatttatataattgaagggagaaatagtaatataataatcgtagcggattttagtaatttattattgataatgaatagagtatttatatagaaaattaataagggagaaaataaagttattaagaatatttaatagggaaaggataaatgttattgggaaaatcggatatttatatgtaaaaataaaaagaaattggtttttattatatattatatataaagattaatttaaaatggattgaagattttaatgtaagatttgttattataaaatttttataataaaatagtgaaaagttttatgatattggtttttgtaagttgttttatatgatattaaaaatatagtaataaaagtaaaaataagtggtatttcgttaaataaaattgtttttggataataaaggaaataattaataaaatgaaagttaatttatagaataggagaaaatatttgtaaattatatatttgataagtggttaatatttgttttaatttgtttttgttgtttataatagaatatttgaaattgggtaatttataaagaaaagaaatgtattattattttttatagttatggaggatggaaagtttaaggttgagggggcgtatgtggcgtaagagagtttttttgttagtggggattttttgtagatttttgaagtggtatagggtataatatggtaaggtggttaatatgttgtgtttaggtcgttttttttttttttttttttttttttttttttgagacggagtttggttttgttgtttaggttggagtgtagtggcgcgatttcggtttattgtaggttttgtttttcgggtttacgttatttttttgttttagtttttcgagttgttgggattataggcgtttgttattacgttcggttaatttttgtatttttagtagagatagggttttatcgtgttagttaggatggttttgattttttgatttcgtgattcgtttatttcggttttttaaagtgttgggattataggtttgagttatcgcgttcggttcgtttttttttttatgaagttattagttttatttgtttgataatttattaatttattagtggattaatttatttatgtgggtagaatttttatgatataattatttttttaaggttttattttttaatgttgttatattgaagattaagttttaatatgagtttcggagaggatattaaaattatagtaatatttaaaatatataaggaatttatataatttaaaagtaagatataatttaaaatatagttgaaataaataagttgattttaaaatggattaaggtttatatttgtttatgaattttagtttatgaatagataatttttaaaagaagatatttacgtagttaatagatatatgaaaaaatgtttattattattggttattagagaaatgtaaattaaaattatagtgagatattattttatattagttagaatggtaattattaaaaagttaggaaataggtgttggagaggatatggagaaataggaatgtttttataatgttggtgggagtgtaaattagtttaattattgtggaagatagtgtggtgattttttaaggatttagaattagaaatattatttgatttagttattttattattgggtatatatttaaaggattataaattatgttattataaagatatatgtatacgtgtgtttattgtggtattatttataatagtaaagatttggaattaatttaaaagtttattaatgatatattagattaagaatatgtggtatatatatattatggaatattatgtagtaataaaaaatgatgagtttatgttttttgtagggacgtggatgaagttggaaattattatttttagtaaattattgtaaggatagaaaattaaatattgtatgtttttatttataggtgggaattgaataatgagaatatttggatatagggtggggaatattatatattggggtttgttgcggggtgggggaagtagggagggatagtattaggagaaatatttaatgtaaatgacgagttaatgggtgtagtatattaatatggtatatgtatatatatgtaataaatttgtatattgtgtatatgtattttagaatttaaagtataataaaaaaaaaagagagagagaaaaaaataaaataaaataaaataaaatggattaaggatttaaatagatatttttttagagaagatttatagttaattaataaataaaggtgtataatattattaattattaaggaaatgtattttatattagataggatgtatttaaaatgttaagggataataagtgttggtaaggatatggagaaaagggaatttttgtatattgttgttaggaatgtaaagtaatatagttattatggaaaataatattgtggtttttttaataaattaaaaatagaattattatatgatttaggaatgttatttttgggtatatatttaaaggaaataaaaattattattttgaagagatgtttgtatttttatatttattgtagtattatttataatattcgggatagaggaataaattaggtgtttattagtggatgaatggataaagaaaatgtgatatatagatatatatatatatatatatatatatataatgaaatattatatagttttaggaaaagaaagaaattttgttatttgtgataatatggatgaatttggaagattttaggttaagtataattagttacgtatagaaagataaatattatatgattttatgtatatatggaattttaaaaagttgaatttagtagaaaggtgattattagaagttagggggtggaagaaatgggtagaagttggttaaagggtataaatttgtagttttatgataaatacgttatgtagatttaatgtatagtatggtgattataatgtattatatatttgaaatttattaagagtgtaggttttatatatttttattataaaatgaaaaatagaagtaagtatttgaagtggtagatatattaattagtttgattgtggtaattattttataatgtatatatatattagaattatatattgtaatattttaaatatatataatttttataattatattttaataaagttaaagaaaagaaaaaaataatttgagtagttaagagaaatttaatattttagattttataaatgttaattatttattgaattaatttaagatggattaaagatttaaatgttagatttgaaattataaaaattttagaagaaaatttaggtaatattatttaggatataggtatgggtaaggattttatgtttaaaatattaaaagtaatggtaataaaagttaaaatggataaatgggatttaattaaattaaagagtttttgtatagtaaaagaaattattattagagtgaataggtaaattatagaatgggagaaaatttttgtaatttatttatttgataaagggttaatatttagaatttataaagaatttaaataaatttataagaaaaaaataaataattttattaataagtgggtgaaggatatgaatagagatttttaaaaagaagatatttatgtagttaaaagatatatgaaaaaatgtttattattattggttattagagaaatgtaaattaaaattataatgagatattattttatattagttagaatggcgattattaaaaagttaggaaataataggtgttagagaggatgtggagaaataggaatatttttatattgttggtggggttgtaaattagtttaattattgtggaagttagtgtggttattttttagggatttagaattagaaatattatttgatttagttattttattattgggtatatatttaaaggagaattgaataatgagaatatatggatataggaaggggaatattatattttggggattgttgtggggtggggggaggggggagggatagtattgggagatatatttaatgttagatgacgagttagtgggtgtagcgtattagtatggtatatgtatatatatgtaattaatttgtatattgtgtatatgtattttaaaatttaaagtataataataataataataataaaataaattatgttgttataaagatatatgtatatatatgtttattgcggtattatttataatagttaagatttggaattaatttaaaagtttattaatgatatatcggattaagaaaatgtggtatatatatattatggaatattatgtagtaataaaaaaggatgagttcgtgttttttgtaggaatatggatggatgaagttggaaattattattttcggtaaattatcgtaaggataaaaaattaaatattttatgtttttatttataggtgggaattgaataatgagaatatttggatataggaaggggaatattatatatcggggtttgttgtggggtgaggggagtggggagggatagtattaggagatatatttaatgtaaatgacgagttaatgggtgtagtatattaatatggtatatgtatatatatgtaataaatttgtatgttgtgtatatatattttagaatttaaagtataataataataaaaagaaattaaggaataaatttttaaaagtttattatattaagatatgatttgtgtaataaaattttaagggtgtaaagaaatattgttgttgtttattgttgttatttatattttatattttttgggaaaaaatttttttagtaatagtttattagaatattagatttaattagtgtaagaagttattttagtgttaggaatttaagggtatacggataagtaaaataaaattatatattataagaagggaggagaattaatatgtatttagtatttattatatgttagttattttggtgagtatttttttattttattaatattgaatatttataaataattttgttaattatataaagatgagttatttaaaaatttttttttggttgtttaaggtttttagtagtttataggttgttttggtgtatattaggaaaaggtgtttttttttgtaagtgaatgtagttttattttagagatattgttgtggattttagtttttttaattttttgtgtagtgagttaatttatataattatagtatacgtgttttgaagatatatgaaaggtattttatttttagtatgtttaaaatttaagttttaattttttttatatattggtgttagtatttgtatttatttaattgtttagattatttattttggaatgatatttaattttttttttattttttttatttaatttattattaaattttatttttgatgtttttaaattatattttaaattaaattattttttattattatgataatttttgtttaaatattaatattttttgttttttattttgtttttttgatattttttttgtttttttatagtttatttattttattatagcgagggagatttttaataagtattttttaaatgaagaaagtaatttattattgttatttttaatttatagaagagaaatttatgtttaaaaaatattaatgatttgtttaaggttataggatttggaagtgataatttggataggaatttagaattgtttaattttaaattttaggtagttagagagtttatttttatgtaatttagtaatattttaatttttaattttttgtttatagatttttagtgtataagtttataattttagtatttttttaatttgggtttttttgtatttttaaggaaaaatttgaattagtaaatattttattgttgttttaataagttatattttaaaatttataaatttaaatgattatttttttgattttttagtttttttaatataatttataaattttagttattttaagtttttaggtttttacgttttgttagttttttttttattatttttagatataggaatataaatgtattggttaatttgagattatagaaattttttggtaggaagatattaatattaggtaaggttattatgttagtttaggtatatgaaatttagtatttaaagtttagtttaatttaaatatattatatataaaagttgttatggttattttaaaatttttttgaaattaaatttatttttagtatttttttagtaaatgttaagtgtagcgtatgaaagtttttataataaattttaagtgtagtatattaaaatgttcggtattttagtggtattttttatttttgtggtaattttattaatattttgatgtattttttttttttttttttattgagatagagttttgttttgtgggttaggttggagtgtagtggtattatttcggtttattgtaattttcgtttttcgggtataggtaatttttttgttttagttttttgagtagttgggattataggcgtgtattattaggtttagagaatttttgtatttttattagagatagggttttattatgttggttaggttggtttcgaatttttgattttaggtaatatatttatttcggttttttaaagtgttgggattataggtttgagatatcgtttttaaaatttttatagaattatgagaaataagaaatattattataaaatagagaatgtgttttgtatttaatttttattataatgattgttaagtatggaaggagagtatttatttttagaaaagaagttgaaaaaaaaatattattgtttttatatttttgagtagatttttaattatattttagtgaaatagtaaatgatattatgatttaatataatttaaattaattataaagtattaatattattatttatttttatatttttatgaaaataatagtgataatatgattagttttttatgtaatttgttttgtttttagattttttagaaagtttgtttttatgatattattaagaaataagttttagattataggatgtatatttaatcgtaattaatatatatatttgtatttattataatttgttatattgttattgaatttgaatttttagttagttgagtaaatattttgttatttttttttttatttgattttaatttattttataattatatatttttttgttttaatgtttgtatgtatagtttattatttttttttattatatgtatttattttaattaaattttgtttgtttttttaatgttattaaatttataaattaagttatgaggagattttgtttttagttttttgtttaattggatatttgagggtgttgattgggtaattttttgtagtgatattaaaattatagaaatagaatatttaaattgattttttttttttttgtttatgtttttagagagatttaaaagagattatagtaagtattattttgttttttaataaaaatttgttttttattagtaatatttttttagattgtaaatgttttggaggaaagagaaattttgttatatgttaagttatatgaatattaagtaatagataaagttttttagtgttggtttagaatgatttggttgggagaaaaggaaaataatagaagtgatgagtaagagaaaaggaaagtaataaagataaaagggagagagagaagaaaatagagagggaaaaaagggagggaggaattagggtagtaggaatggtatttgtttattaaaaattaaatttatttttagagatggaaagtatatgtagtagttggtgggagtggttgttagtatttattattagattagtgatgattttcggggtttagattttaatttttgagaagggggtgatagtaattgaagttgatatgtaaagattagggatttaaatttttatgatttattttatgttttttgtgtgtgtattttagtattattaattaattttttaggtaagtgttttgtggtttttttttaattttattgttatttggtttgtaagttttattttttttgtatttttttttttttaagaaagtttttaaaattaagtataaaaataattaatatttgtatattatattttagatgtgataaattgataatatttttgttatattttttaagttattatagatatattttatttttttttttttaaaggtttattaatatattttaaatatttaagtttatttatatatatttatagtttttatttattattgaataaaatatagtatttttttttaatgtttaattttattaaaatggtatttgtttgatagtattattacgatttgtattttttttttaaaatgtagttttgaaatttaggttatatattttgttgaataatattttattttatgaatatataatatttttttattatttttattatcgatgtatttttaatgtttttaatttttgttattataaataatgttgtaaagataatttttaagtagatggaaaagagtttattcggggtatatattttgaagtaggattagtgtttatattgtatatgagtatttatgtaatttatgtatattttaaattttagtagttattaattaagttttttggtagttatatagaggtatataaaaataaataaatatttttaatttttttgtattagtaataattttagattttgttatatttttttattattgttatttgaatacgtatataatttttaaaatttgtattttttgtttatttttgaaattgagtatttttttataggtttattagttagtgaggttttattttatataaattgtttgtttatttattttatttatttatttattagttattgatttgtagtaattttttattattatgaaagattaatttttatatgttatgttaaatatttgtaattattttatttaattttgttttttagttttaaatttttatgttgttttttgatttttagaaggtttttatttatttttttttagtattatataatttattgtaataaaatttgttaattttttgtttttttttagagtttttgttttttagtttttttggttttatttgggtattataaagattttatttaatatttttttttaatagttttgaaatttttttttttatatatagaattttaatttaaatggggttttgttaattgttttttggttttggtgagtgattttagtaataatataggtgagatttaattttttttttatttggaaaattaattagagggatttcgttttattttgttttaattagatttattgattggtgtattttttttttgttgatttgtaatgttatttttattttatatatttcgttttttcgtggattttattttttgttttagtgattttttgttttttattgaattaatattttattgtttttattattaaaattttataatattataaaaaatagtatattatttttgtttttttttagaaatgtgttggttattttttgatttttttttttatataagaattttataattttttaaaatttatgagttatattaggattttattgaaattttattgagtttgtagattaatttgtaaaattaattatttttatgtattaatatggttgtttattatttaaatttttttatatattttttaataatgtaatataattttttttagaaaggttttgtatgttttttgttgtattaatttttatatatatatttgttttttgtttcggatgttaatattatttttttatatggattttataaataattattgttggaatataagttatatgttgtatatttgagagtagattttgtatttagttattttgttgtgtttttagagttttaataatttttagatttttttgaattttatatgtaaaaaattatgttatttgtaaaatttgataattttgagtttttttttttaatttttaaaattatttttttgttatagtttgggttatgtatatttatgggtaaaattttttttttttatttttgttttatttttgtttttttttttagtttgttgtatgaaatttttaattaatttttagatttttttattttttttttttattttatttttatatgggatattatgaatttttatgttatttttatatacgggttacgttaattttttttgtattattttaattttagtatatatgttgttaaagtgggcgtttttattttttaatataagtatttaagtaatttttaaatgttgttgaaatttatatttttatatttatttatatttttatgattatttttttattttaattttatattttgatattagtattgttttaatatttttgttttaattagtatttgtttattttttatttttttattttgaattttaaaagtttgtttttgttttgtgttttttttaaatggtatattgtttgattttgtttatattaataatgtaaaattttttgttttttaatagatgaatttagtttattttatattgtgaattgttatatgtttatttaaatgtttttaatttatattgtgtttttaatttatagtattatgttttgtttttttatttttaaatttttttttttattttttgttggtatattagaattttttgttttttttgttttatttagtgtttttttggattttgttttatgtattttgatatttgtaatatgtgtattatttaatttttttttaaaaattaaagataatcggtatttttttttaagattagataataatttttatttgattattttttttttaaattattttttttaaattttttattttgtttgtggtattttttttaaagataaaataattatttatttttataattaattattatttagatttataataatattttagtattgtttttgtttaatattatttgttatattttgtgtttttttttttttattttttgtttaaatataattttttattggttttttaaattttatatgtatgtgaaaaattttttaagtttttatatggttgaaaatagttttattttatttttagttttaaatgaaaatttagttaggtatagaattgaatattattttttttttgtattttgaagatttattttatttgtttgttgtttattatttattattgttgataagaatttattattagtttgatgtttgtttttaagtaaatatatttttaagattttttttatttttgtgttttgtatttaattataatgtttataggtgtgagattaattttttatgagtgtgaggttattttgagtaggataaatgaagtgaattttatatttataatggaaaattttgaatgtttttatttattttgagtaggataaatgaagttaattttatatttataaatatttaagagtttttattttgtggatttaatttttttaattatagaaaaatttaattttaattgttatgaattttgtttatatttatatttatatttaataataaattgtagtttttatttttaaaattattatgtatgtaaagattttttttttattttttagattttgtgattttttttttatattttttatttgtattgattaagttagtttcggattttaaaattttagtggttttttttaatagaattttattttttatttatgagaagtttaaaataggaattttagattggcggatggttttttttttagtagtgttttaggtatttaaatttattttaattaatgattttattatttttaaataatggtttttaagtttattatgttagtttattttaagtgaatagaaagaaaaaagtttgaagattatgagtggatgattttataaataagtttggatgatttttatattatttttaataatattagattggttagaatttaagtatatagttatatttaattataagggaattttggggaaatagttaattacgttgtattagttttttatagttgttttaataaattattataaatttaatggtttaaaataatataaatttattatttattagttttataggttataaatttgttatatatgtttttttggataataattaggttgttagtaagattgtattttttttggaggttttaggaataaatttgtttttttgtttttttagtttttagaggttggttatattttttggtttatggttttttttttttatttttaaagtgaataaaaatgaattaagtttttatattatattattttgttttttttttattgtagtattttttttttttatttttttttattttttttttttatttttaaaaatttttgtgattatattaggtttatttagatatattaaaattattattttattttaaggttagttgattagtaattttaattttatttgtaatattaattttttttttttatgtaatttaatatattaaataggaagataattttaggtttttataatgtatgaggtttatggttttgatttttgttggtgattaggtgtttaagttttagttttttaataaggtattatatgggtggtaaaattttttatttattattaagaatatgggtttttttttgatatattttttttgaatatattatttttttttttagtttttaagtttagttttattttataaattttaaaaaatattatgtttaaagtaattatttaaaggagaggatgaaatattttttttaatagtaagtatttttttagtaagtttcgaggttttaaatatttttattattttgattttttagtttttaatattatttaagaattttttgatttggttttttgttattttttatttttatagggtataagtgaattttggaaagtggaaatttttgttgaagtagttaggtggtaattgtttggtgtaataaaaaattttttcgaataaagggaaaatagaaagaaaattaaggagagagaggaagaggtggaggaaaggtagagaaggaaagaatagagtagtagaatcgttaatgaaagaagatttatagggatagaaaaatgtttttagattgagaaattagtaatttttaaaaatatttttatttttttattaaaattgaaagataggttgtatagattttgtagttttattttattataaaagtattggaatttatatgtagatatttagttgtttattatattgtattgtaattgatattaggaaataagttgtgatttatttttatttttttttttataatttttttgtaatatagtgtttatggtatttaagttttttttgggataaatagaatttattttttttttgatgtgttttattttagtattgtttcgattaagtattggtaagtttttttatttttttttaattttgttgatatttagttttatttagttaagaggatatttttttaaattttttagattttttcgttgtagtatagtagaagtttaagttttatatttttttaatttttttgttttttataattagatattttaataattagttaaaagtaaatgtaagtttttagtggtttattatgatgatatgaagagagtaatttttaaatttgaagtgttggaaaaatagagtaaataaaggataagagtaaaaagttagtaagaaaaatgaggatgaagataatatagaatgagggataaatgatattagttgtgtttttagaattttaaagttttatatggttagtacgaaagggtagttttttttgaggtatttttaagttaggttggtagtaatggaagagatggttaattttttatttttttgagttgtaattgatattaagggtttggtgtttttaggcgtttttggttttgatatttatttttgttttgttttttgtaaaaaaaaaaaaaaaagaaagaaatggatagtttttgagttagataattatatgaattttttgtttatatttatttttaggagagtaaggagggaaattttatatttttaaattttaagtttttttagtgtgttatagaattaaggaatattttttaattttgttgagattttgttttttatttgtttttttttttttattattgagtattttgtttaaaattaatgagaatttcgaagaatgagaagtttatcgattaaagaataaagagaggattaaaatggttttagttggtaattatagttttagtaaaatagtaataaatttattaatttaggaataggagggaagaagagagaggtttgtgaagagattagggaatggaagtaggggataaggagaggtttgtaattaaagtaagttattttttttgattatttatagatattatatatgaggaaaaaatgaaatttaaagatattatttaatttgatttaaggtatatagttagtaaaagagtaaaattgaggttttaaatattggtttttggattttaagttttgaggttgtttagttatttttaggatattattaaatgtatttatttttttaatttaaagtattttttggaaataaaatgtttgttttaaggaatttagaaaattatgtatatgttgaaaatatattattttaatttttaaaatgtaatttgaaaattttaaaatgtaaattaatataaaatattagaattagtgtgttaatttaatattgtgttataattttattttatgaataaggttgttttgttgtatatataattgtgaataggtgtttttagaaagttattaagtttaatattttattatttttataattaaaatatgttttatttagttttattttgtttttatttaatttatggaaagggtaaaatatttgggagttgaaatatgttaaataataaatttaaatttttagtttttttagtaaaatttgtagaggatttatgtgagataggtttgttataaaaattttttaaaggggaaattatttagagtattgtagttgttatatttaagataatataagtattttatagatagtatagattttagtgaggtaagatagaaaataaatatataagtaaataaatataatgatttttttttttagataatttttattatgattattagattattatagtaaattttacggagaaaataaattaagataatatgatagagtaagattaagaagtgagggtttttagttaggagattagaagaaatttttttgaggagatatttgaattgattttgaatggcgaaaaggtggtagttataggaggattttagggaagagtattttaggtagaaagaatattaagtttttgagaggggaagaagagtagtatgtatgagagattgtaggaaggttagttgtgaaagatcgtggaggagtttgaaaggtagggcgaggttagattataaaaagttttttagaataaaatatggagaataattttgagtattataataagttattgtttttattagggaagggataaagttatatttatgttttaaaaaggtaattttggtttttggtagagaatgaaatgggagagaatgattattatatttatttatgatggtaagaaggagagaggtatagagtaaagttttatatgtgttttaaagataataggagtttttattggagaagattgttcggaaatagtaatggggagtaaaaatgatatttatttatatttaggtatgtatatgggtatggattttttttaaaataaatatataaaaaattagatattatagttttaataatagagtgagattttgtttttataatgaataaaaaattagtcggtatggtggtgtgtatttgtggttttagttatttggaaggttgaggtgggaggattatttgagtttaagaggttaaggttatagtgaattgtgattacgttattgtattttagtttgggtgatagagtgagattttgttttaaaaaaaaaaaatttaagagggttgtaagagatatggttttttaaaaatgttataatttttaattgataaaattgtatatatttatggtatataatataatgtgttgatatatgtatatattgtagaatgattaaattaagttgttaatatatttatttttttatatattttttgtggtaagaatatttaaaatttatttttttagtaaatgttaagtataatatattattaattacgattattatgttatataatagattttttgaaagtattttttttatttaattgtaattttgtatgttttgagtaatatttgagatatagtatttttttaaaaaattgagatagaattttattttattatttaggttggagtgtagggtgtaatttcggttcgttgtaattttatttttcgggtttaagcgatttttgtgttttagttatttaagtagttgggattataggcgtgtgttataatatttagttaatttttgtatttttagtagagatagggttttgttattttgtttaggttggttttgaatttttggttttaagtgatttgtttttttcggttttttaaattgttggggttataggtatgagatatcgtatttaggtttgagatataggaatattaaagtaagacggtgaagaaaacgtttggagaagttaaagatataggaaaatttgttgatatgaattttagatagtatggtgtgttttagggagtaaggagaggtggaaggaacgtttcgattaggaattataaaaagtattatgataataagtatttttaagatgaggaattgtttttggatggtgagtaaattaaatgaggatatgatatattttgggattaattttaaaggatgatgagtaattagttatgtagagtatttagttgaaagatgtatagggttataggaagttatttatttttgaagtttaagatgatgtgtggttttatagaatggatgaggtttttttgagagataatttttataggtaatttattggattgtgataattcgagaaagggttttttaaattaggattttaaagggtttgattttattattttcgtgaaaattttgaattagcgtagtgtttaagatagaggagattatggtttattatttatatatgtataaatagataaggattgtaatttgaaatgatgatataataatatgtgttgagtattatgttttaggttttgttttaaatattttttttttataataattttagaaagtagatattataaattttatttttaaaatgaataaatttaggtataaaaaaaaaaaaaataggtagagtaatatagttagtaagtagaggaattagaatttaaatttaagtattttagtagttgatggtttattgtatttaatgagatttaattaagggttttttttttaaaatgatttcggtgagaattatatattttataaattaattaatttagattgatgtggatttttattattattttttagtgttaattttaggaattatattttagtttattttttattttttaatttaggaaagagaaatgagagtaaatagataataagaagggagtatatagggaaattaaggaaagtttaattaagattaaggttttttattttttaaaagtaagtagaggaaaaagaaaaaaaaaaaaaaagattaagggttaagtatggtggtttatatttgtaattttagtattttgggaggtcgaagtaggaggattttggaggttaggaatttaagattagtttggataatatagtgaggttttgtttttatagaataattaaaagaattagtagggtatggtggtatgtttgtagttttagttatatgggaggttgagttgggaggattatttgagtttagtagtgagaggttatagtgagttatgtaattattgaattttaatttgggtaatagagtgaaattttgttttttcgattttagttttttaaaaaaaatttaaggttttttaagtttttttaatagttttagtttttataaaggttgagaagaaaaggaaaagggaattattttttttgtttattattagttttatatgttattttgggtttcggttatattattaaaatataagatgtttaaataatttatgaaaaaattatattatagttggtatagaggatttgatgttttttggtgagggtagtgtgagggattttttttttgattttttttttaaagggggattaacgttgatgtttttaagtaattgatatgtatttagagatgtgggtatttagtataatttataagggaattgagtaagtttttggttgttttagtattataaacgtttgtttgtttagggattttgttttttttatttatttttttttaggtaggttttatttttagaaagttagtttttttgttttttttattaaaatttattttaaggttaaaaggtttaagaatatagggttttagtttgtgaatttagttttattgaattataaaagttgagtagaagaaaaattattaaattttgttattgatcgattgttgtggggtggggggtggggggaggggggagggatagtattaggaaatatatttaatgttaaatgacgagttaatggatgtagtatattagtatggtatatgtatatatatgtaattaatttgtatattgtgtatatgtattttaaaatttaaagtataataataataaaataaaataaataaataaattaaattaaataaatgtagttttaaaagatggtgagaattattaaattttgtatagttatttaatagttaatgtaagataaataagattaatgtttagattttttttattgaatatagtgagggtttattttatggtagtttgtataaattattattaaagttaatattattaaattttttataagttttgttttagaatttaggttattttataagagaaatattttagagttgaataaaaagaatagaaataaaatgttggagagggaagatggttagtacgttaaagaaaaaaatgtttaaggaatatttagaaagaagagaaaattgtaaagaatatgaaggaaaacgtgttgaatttaaagttaagtaaattggaagttaaaattgtttttaattttttgtatatttaggtatagttttttttttttttaatttcggttttttttttttataaaattagaatttttgtaatattgtttttttttggtttttgaggttattatattagggaaagaagattttttaaattgaaaagatgaaagaaagagggagggagaaacggaaaagataggagaaaggtggtgaatgaaattagaatattggaaatatagtaaagttgaatatttttttgaaatttttatttttgtatagtgtttaagggggaaaagatatgggattatttgtaagtgtggttattttatgagtttatttataggggaatggaaagtttaataatttgagggaggatattatttttgggaagatttttgggaaattgatggattattgaaattttagattgatttgaataattgttattgttttttagttttattttaaggatttatgagtaagtttatttttttgttttaaattttggtgttgttgggtttttatgttaggtagaggatttttttttgttttaattattttttgttttttgttatgttagggtgaaagggtttaagatttataattttttattttgttttttattagtcgttttaattggattatgtttattttttttatatttttttttttttaagataaggagattttttattttgtttaagtaaattattttatttttgtttttgattatatttttttatttttttatttttttagaagttatttttttttttttttatatttttaaatatttttttttttttaattgtttttttttaaggtatagaataggtttgatttttttttattttaaatagatttttttttgattatgtttttttttaattatagtttatttttaagggaggaaattatgttgtatattttgattgtaggtttaggaaaaagttattgtttatttcgtatttgaattatatattatttttttatgaattgagaataatataataagatttattaaaaaattatttttaaaataaatttgtttgttaattatttttaatttatagaggattattgtttagtagttaagtatgtagattttagagttaggttaattggagttgtattttagttttttatttattatttatttgaatataggtaagttatttaattttttattaaaattttaagttcgttatataattaattttaataattagttgaaaattaattaaataaaagaatagagaagaggttgggtattatggtttacgttcgtaattatgatattttaggaggttgaggtaggtggattatttgaggttaggagttcgagattagtttgttgaaatttcgtttttatttaaaatataaaattagttgggcgtggtggtatgtttttgtaattttagttattcgggaggttgaggtaggagaattgtttgaatttgggagaggaggttgtagtgagttaggatcgtaatattgttatttaatttgggtgatagagtgagattttattttaaaaaaaaaaaaagaatagagaagtgagggaagttggaaaaaatgaatagagaagggaggaaaattaaagaggtaaagtttaaataaattttttggaattgattttaattgattgttaaaaaaaaaaaaaaagaatatattttttaaatgaagggaagattgtgataggaatgaggaggagggaagtgaggaaatcggtaaaaaatttaaaatagataattttgattggatagggttttttttttgatttatgtgttttttttataaaagtttttatattgattattatatttgtggttgtatattagggttatattttttattagtaaagttgttttttgtttaaagatggaattaaatatattatattttattattttttttaaaaggtattaaaatttttagatgttttataatttgaataagtttattatttataggttttaattaaatgtgatttaattaatatttatttttaaagtaacgaaaaggaagggatttatttgttttattttaatttaggttataattatatgatattgattttaaagtgtattgttgttgaagtatagatggtgtttatttaaatttttttttatttgaaaatagagtttttaaattagttattattagttcggtgttatttatagatgtgttttgtttggttaggatggtattattttaaattttgaatttgaatgtttttgggtagggtatggattttttattatttttattttttataattagtagatttataattatgagatttgttgggttttttaatgtaattgagtttgtgatcgatttttatagagataattaggaattttgtttggtatggaaaatgtggtattttttaaaagaattaattttgatgtttttattaggaagaatatttatagagataatgtttttaatttaaaatatataatatttagtattttggtaggatatgtatatcgtaagttttttttatttttttttttattttgtaaggtaataagtaaatattttttattgttttgtttatttgtttttagttgggaaacgttataaaatatttagtttaagaatttttttttttggtttagtatggaggtttatatttgtaattttagtattttgggaggtcgaggtgaggggattatttaaggttaggagtttgagattagtttggttaatatggcgaaattttatttttattaaaaatataaaaattagttgggcgtggtggtatatgtttgtaattttagttatttaggaggttgaggtataagaatgattttaatttaggaggtgaaggttgtagtgagtcgagattgtgttattgtattttagtttgggtgatagagagagattgttttaaaaaaaaaaagaaagaaaaatttttttttttttattattttatattattttaggttaggaatggaatatatatgatttgtgttatatttttgtttatgtttttgtttgtggtagaaattagtaattgattatgatttttttttttgtttagtttatatgtattttaaaatttttgttatttttagatagttattaataattgattaaaattaaatatgtataatttaagtatatttgttatttttaatataggttaatattttaaattttaaaaaattaagtatatgaaaattgtttttttaaaattatttttatttggtggtaggagtggttttatttttttaagaaattgatagtttagtgattgacggtttaaaatattatatagaaaaatagatatttttttttaaatgttgagggtagattttgttatttttggggaaagttattatttttttttttaaaatagtaaagtaataaataagcgaaaaataattatatataaagaaggaaataaattatttaattattttaagaaaaaaaattgtaaaatttttaatattttaaaatatgattggttattttttaagatagaagtaatagagattaaaatgatataattaaggtattaaggtatataagaagatagggttgttttaaagattaaaataatagaaattaataaattaaaaataaaaatagaattaagtgtatattataatattttgttgttaggatttagaattttttaaaggatagttagaaataagaggaaaaattaaagtagaaaaaagtaaaatataaagtagtttattattttgtcgaagtgttttatttatttatagttattgaatatttttttttataatatttttaatataattttttattttttttttttgttattatttttgattttttattgtaattttataatataggtaagatagaggatataatttttgttttagagatgaggaaattaatgtttaaaatatttagtgatttgtttaaaattatagagttagagaatagtaaaagtcggatttagttttttaattttaagattgtttgtattatatttgaggagggggaggagggaatgggattgtttatttttatgttttttgaaagtttaaatttaagtaatgttatattttttaatttttattataggtagtataaaatgtttataaataattgaagaatttttttgtaagttttttatatatataatttagttttttttttattgatatttaataattgtataaatttatgggatatatgtgatattttgatatatgtatattatgtgtaatgattttgatattttataatgtgtttgttattagaggaatggggaaggtggtgagaaagtatataaagatggaggaaaggagaaaaatttgtaattttattgtttttttttttattagtgtgaggaatttgagattgattttaagattttttaagtgattgattaatttttttatttaataaagtggaaatttttataataaaaattagattaattaatgaaattgtgaaaaagattttggggttagggaaaattatttataatttttagaaggatttgatagtaggaagataatgaaaattaagaataagaaaaataattgtagggagtatgattttaatagttttttaaggaaaaaaggaaaatgtttatttatttttttgttgtttttttatgtaaattaaatatgtagtaaatgtttgatttgaaattttttgagataaatatttttgagttatgttttttttaaatttattttttttgtttgtattttagttagaattgtaggagttatgagtaagttttttttttgttttttaatttttatgtgttttgttttattaaattgttagaatatgtaagatatttatatttttagatttttttattttttttataaattgtttatttttttttttttgtttattttttatttttattttaataaattggggtgtttttgtaagaaagtattattgtttttaattttttcgaaattttgagatttaatagtaaagggaaaagagtgaagaataaaaaatggttaagtgaaaggaagaaagatttttttgtgagaaaatttagtaatatttaaagaaagaggtttgatggtggttattttatttaagatttattaagaaaattttagtgatatgtagtgagttttagtttattgatcgaggattttagattgttattgatgtttgtgtgggatgtatattttttgttatgaataaagaataaatttgaaataagtatttagatagaattttaaatgaaattgtagtatatatttttggaagaagtattggttgggaatagagaataaggaataagtgagaggaagttgatttaaaaaggaaaaaaaatggtaaatggaaataatgatttttatatgatttgagattttgttagttttttatggttttgatgtttaaagtgggtttaagggtttgtattaacgttattttggagttttagatatgtagagttttagtttattgtttatttcgatttattaaattagattttgtattttaataagatttttaggtgatttgcgtgtatattaaagtttaagaattattgttttataggattttaattttttgttttgagagaggaaataaaaagatgaatgtatttggtttaaatttaattagtttttttagttttgtagattttttatattaagagtgattttaaagttaaagataagaaagatgaaatttattagggttttatttattttttaatatatttttattttttatttttgaggatgtttagagtttgagtttttgagataggattaattttgaaggaaggagaaaaaaagtgatttgataattaaagtttatggtatattatattttgtgtttattttttttggattatttatataaatggaatattattaaaataattaagttaaattttgagagtaaatattgggtaggtattataaaagtatatattaggttaagtatagtggtttatatatgtaattttagtattttgggaggttaaggtgagagaattatttatagtttatgaggtgtagagaggtgtggtggggtgtgtgtgtgtgtatgtgtatgtgtgtgtgtggttataaagaagaagattgttattgtattattaataagtatgtgggtttagtgttttaatttttttgtttaatatttatatttataaatgttttaagttaatttagtagtttttatttttttttatatggtaggttaagttattttgttgaataagggttaaaattattatagagatagtaatttttattgttttttttagatgaggttatagattttagttaagtaagtttaaattagttagttggaagataggtaatggtttgtgtaattttttgagatataagtaggatattcgtggggaaaggggaaggaacgttgtttgattaaatgtgcgtttttatagttttagttggtagattttattagtaatcgggattttttaagatgaagaaagaagtatttataaatttaatttgtttttttattgaagtggaaattttgtttttggtgtttatatttgtgatgtttttttaggaagaatttaaatgtaaatagtatttttttattagttttattttgttttttttatattttaattggaattattagatttataagtgagttttttttttgttttttttaatgttttttggttttttgtaggatatagggttttttttatattttaattgttattatttttatttttgtaggattttttatttatattttttaattgtatttaaattttttgatattttttgatgtttaagtaattagatataatattttgaattgttattgagtttaggataagggaaagttaaataatttatgtttaaaattgtagtttattttaattatttatatttattatttttagttatttaaattttttatttaagatggatgttgaatgatttgatttggtaggagggttatgtagtttttaggttaagattatttgtagttttatagtagttgtttttttttggttgaattgttttatagtttttttagaaataatattggtaaaatgaaaattttattaatgttaaattatattttttttttttttgtattttagtgtaatttatagtttttattcgtaagtattaagtttgtttttttattttggtttttttgatatttgatttataaggttttggggtttgatttgttttgtatttttaaaaataattttaatttttattttagatttcggtggtgtatatgtaggtttgttaatgggtatattgtgtgatgttgaggtttaggggtgatttgtttttttaatattgttttttttaatttttttggtatttttattatatagtttttaaagaggttatgtacgaagtgttaagaaattttataggttaatatttaaaaatataaattaaaatagtttttttagaaatagttataatgatttattagtaagggaaggtatattttttaaataaattatgtttttaaggaaattaggggtaaggggtaagaaaatgtaagaagaaaaatagaggtataatagattaatatggagtgagttttttttaattttttgaagatttttaattattattgaaagtaggaggaggtttttatttttgtaggttttttatattgtgtagggagtttgtttgaggttcgttatataagtaatttttgattttttcgttgtttttatttatgatattttttagagcgagtgttgggaaatggaaattttttttatagtggtgaagtatattgatattttttttttttttttttttttttttttatagtcggagttataggattttttagtaagtttgttttttgattttttatagtgagtattttatttttttgtagtattttagggatcgttatttggtttttatgttgggattttaagggtttggagtttatattttttttaatttttatttttttttaatttagtattttagtaagttatgattagttgtgtgaatgtatattttattaataaaaataaattataaagtggagaatgaatttttgtagatttttaatggttttttagtattatataagggatttttagatgaggaggtttttatatgtattagtttgttatagtaagaaagttattatttttattatttaattgtagttgaatttgataatagtgatgtagatttttattagggaaagtatataaattaaagtatataaataaaaagtatatataaaatatatatatagttattgatttttttttttttttttttttagagtttttttaaaaaattattggtaagttatttgatttttaattataatgttttttagtattttatttagaatattaatttatttttattttaattatttatgtttaaggatttaaggattaagtttttttgttattttataattttatttagtattttagattggatttatttaggttttgtaataaaaatatattaattatgaagttgaaatgtaaagtgaaaaatattttgttagagatggttttaagttgtttttattttagtatataatttagttttgtagagttaatatttaataaagatttagaatttagtatttaaattttttgttgtgttttttatgtaaataatttttttattattagattatttttattttgtaaaataatgtaaattttaagttttttttttttattttttttgagatggagtttcgttttgttattcgggttggagtgtagtggtatgatttttatttattgtaagttttatttcgtgggtttaagtcgtttttttgttttagtttatcgagtagttgggattataggtatttattattatgttcggttaatttttttgtatttttagtagagatggggttttattttgttagttagaatggtttcgattttttgatttcgtgattcgttcgttttagttttttaaagtgttgggattataggcgtgagttattgcgtttggttttttttttttttttaattgttttgaaaagttttttttagaagagttaggttttatttttagtaatttttagtaatttagttatattttttgagtgatttttataatgttttattattgtttttttaattttcgcgtatattattttattgtatttaaataatatttaaatggtaatgagtaaggtagttattatttttatatttagagatgaggaaattgagggttaggagttattttttaaaaaaataagaggatgggttagttaataaaattaagattgaagttttattaattttttattttttttattattatttttgggtgttataataggttattaataatgaataaaatgaagttttaatattgagattaaagggtagtaaaggtttagaggagaaaaagtgagagaatgagtaataaataataatagatatagaatgaagatgtagtttagagagagataaataggagaaaatttaaaaagaataaaagtaggaagaaaattggaagtagaaagagtaagtgaattggtatataagagaataaagaagggaaatgagtatgttgagaaagagaataaaaataaaggtataaaaagttataaattgaaattggaaaggaaggaagaaaatatagaaaaattgaagaaataaaattttgaagtgattatttatttaaggatttagtaatttatgttaagagggtaggtattataagatttttattttagaattaaagatatatatttgtagatataggtaaagtaattattaagttagtataatatttaaatgtgtaattggtttattgtttatagttaagggtatttagatttggaaagttattttttaggtgttttatataggaaaaaaaaaatttagagttaaaagttcgaggattattgattaaaatgtggatattttttattttgagtgatattgaagtgaaggattattaattgtaatgtttattgggtgaagatatggtttttttagatttaattaattacgtagatttagaagattattatagtttttatttgggaatagtttatttagtaggatttaagggaggaagtatagtttgttagtaagggtattaatagttatttttttgttgtgggagtagtattcgttatgatttatgtaggtgtttatatagttatttaggatttattttgtttggttttttgttagttgagttgggagttgatttagtttagaaattttatagatttattaggaattaaaattttttataagaattttatatatattatttgtagggatttcgtaaggaatatgattaaatatatgggttattatatttagggaagtttaaagttatggttttttaatatatatttataatttttttagtttagatgtagtttaatattaaggattatttttatgtaagtagtgttgttaaataatataataggttttcggttgggtgtagtaattttagtattttgggaggttaagattaggggattataaggttagaagtttgagattagtttggttaatatggtgaaattttatttttatttaaaaaaatataaaaattagttgggtgtggtgtcgtgcgtttgtagttttagttatttaggaggttaaggtaggagaatcgtttgaatttaggaggtagaggttgtagtgagtcgagattatgttattgtattttagtttgggcgatagagtaagatttcgtttaaaaaaaaaataataataaaaaaaatataataggttttcgatatttattaggttattaggcgattagagttagaaaattaattgaaggttaaatttttattaaaaattgaaggttttggttaggtatgggtttatatttgtaatttttgtattttgggaggttaagataggaggattatttgagattaggagtttaagattagtttgagtaataatagagtaagattttatttttataaaaatttttttaattagttaggaatagtggtatgtagttgtagttttagttatttaagaggttgaggtgggaggattatttgagtttaggaggtcgagattgtagtgagttaggattgtattattgtattttagtttgggtgatagagtgagattttattttaaaaaataaaataaaataaaataaaaaaaaatagaaggttttgttgattttttgtttatagattttaaagttaattaaagtagtagttattgttttattattttttaataagttggaagttgtgagaagaagaaattagatttttattttttattttaatgtttatttttggaatatattagttgattagaaataaagattttagtgaaagaatagttttttgagaaagaaatattttttatttttattgacgggaagtgttttatttttttttattattagtaatgttaatatttaataataaagttttgtttttttttagtattttttaggttggtaaggattttataaaaatttttattttgggttgaaatattgtagtaaatgttaaatattttttttttttttttttatagttaatatagttggattaagtttttttaatgattttataattgatattatttttttttttttgttttattttttaaagttttatttttaggataaaattagtgaaaaatatattttttaaataattgtattaatatgttaatttgaatttttttttagtgtaaattttaggatttattggtaagttgtttgtatatattaatttatttttattggttttttattatgtttgaaggagattggttttaattgtttaagtatttgggttaaagaagttgaaaattatattttttagatttttatttttttatatcgtaattgttaggttttggagggaaggcgagggttaaagaaaagatatagagagagtggcggttgtatagtaaatgtaggttttatgtttagtataagatttatagaagtggggaattagtttaatgttagtgtttattgttgtttataggcgggggtatttataggtataggcgggaggggtttgggtagtatggtttgttggtcggtaggatattgataagatgtttttatgatgagggggttttggtttttgtttttgtagaatgtagtgttttttgtatttttttttagttgaatatgatagggatgtttttttagttggttttttgtttattttgtgtttaggtggttaggtagaatgttttttatagttcgaattttcgtggaatgttttatttttattaaggtttttaaattgttggaggtttataaaatggtgtagtttggattaatattaattatttttttgggtaattaattatattttagaaaatggaaattttattattttaaaatttataatagataggtattgttttaataatgattatagtggtttgttagtaattattagaataattttttaaggtaaaggtgtaatcgaatttggaaaagaatataagaaatgaataagaatataaagatagttgagagtgaaatagagtgatttgaggaaaaatattgggggaatatggaaaggaatataattaaggattttatttttaatatttataatgaaaagtaagaatgaagtggttatgttaaaatagggttaataattttttaaaagaagatttggtttttatggagaggttagagtatagtagtagtgtagtgaaaaatatttaattttgaatatttagatttagtaatttttgagaaaattatttttattgtttgtttttggaaaatattattaatagaggtgttttggggttaggcgtagtggtttatatttgtaattttagtattttgggaggttaaggattatttgaggttaggagttcgagattagtttggttaatatggtgaaattttatttttattaaaaatataaaaaatagttaggtatggtggcgggtatttgtaatttttgttatttaggaggttgaggtacgagaattttttgaatttagaaggtggaggttgtagtgagttaagattattttattatattttagtttgggcgaaagagtgagagattttgttttaaaaaatagaagtgtgtgtgtgtgtgtgtgtgtgtgtgtgtgtgtgtgtttaatttgtttgtttttattttttagtataatattttggatttaatggtaagtattttatttatttttttttttttaggttttttgattttttatagtgtttagagggtttgttttttgttttaaatgttttagatgtgttttattgttataagagtagttattttatatatgtttttatgttttttgattttaatttattgagaattttttagggttattttttttaaaagaaaaagagtaagaaaatgtttttagaaatagttataatgttttttataataatatataagaattttttaaagtagtagagagagaataataagggtagttttttagttttgaagtgttttgtagtttttaaagggtttatttaaagataatggaggagataatgaggaggaaatgagaaaagaaaattaaattttaagaataaatataaaagggagaaaagataataaaatttaataggaaatattatgtagggtttagtttaatttgagttttttagttttttttttaaaggtttttttttttttttatgttttattcggtttattatttttaaatatttttaatatacgtgcgcgcgcgtatatatacgtacgataaagagagaggaaaagaaagataggatagagtattttatggaataggatataatagtaattgggttgtaatttataggaattggtagaagtattatatatggaagagaataaagtgaaagtttatattgtgacgagttagggagaaattggtgttaaaatttagggtatcgaattaattttaggatacgggaaattttgaatttagaaattaagggatagtattagaaagtttaagttaagtaggaagaattattagagggtaagttatatatatttaaataaatatttttttatttagttgagtttttattatgtatttgatattaagttgagtattgaggataaagttatgaataagggagagaaagatatggttggttattgacgttatggagtttatagttttataagataatttgggaaaataaatttaaaatgtgtagagggtaggtagtattttatataattatattacgattattaaaattggatatttattgttttgaattttggttttaattattttttttgtgaatgaataagagttatttgttattgattatttttttgaattaagattgttttttttagtatttatagattgttaagatttatagttttggaagtttttataattattatagggaggataaatataagttagtttattttagaggattttattggggttaaaggaagggttatatttggtttatagttttttaatagttattatgtgttagagaatttatatggatatatgaattttttttttttttttttttttgtttgatttttttttttttatgtgtaaataatttaaaaatatgatagtgtataaatgaaaaatatattgttattttatttttttttagtttttttttaagttataagcgatttggagaaagtgtaaaatgaattgattaaaatttaaatgattttaataaaaattagtggttcgtaatagttttagtaaagaagagtaggaagaaagttttttaagttaataaaaattattgggtggaatatttattatttgggtaatgggtatattaaaagtttagattttattattatgttatatatgatataagaaatttgtatttgtattttttaaatataattaattaattaaaaggttagtgaataagagtgattaaagaaaatgaggttagggttaggtatggtggtttatgtttgtaattttagtattttgggagttcgaggtaggtggattacgaggttagtagttcgagattagtttgataaatatggtgaaatttcgtttttattaaaaatataaaaatttggttaggtaaggtggtttatgtttgtaattttagtattttgggaggttaaggtgggtggattatttgaggttagaagtttaagattagtttggttaatatggtgaaatttcgtttttattaaaaatataaaaaattggttaggtatggtagcgtatgtttgtagttttagttatttgggaggttgaggtaggagaattatttgaatttgggaggtggagattgtagtgagtcgagattttattattgtattttagtttgggtgatagagtgagattttgtttaaaaaaaaaaaatataaaagttaggattttttatagttaggagttaagattgtttttgattatttaggagatagaattggaaatattatttagagttttaaaatagatttttgttttataaatgagggtggtatttgtaggtttttttaaagatatatagtgattttaaaaggtaaagaaggtggtaaaaatgtttatgaaaaataatattaattattatagtgaaataatatatagagggtgtttttaaaggagaaagtattaggcgttttagttattttttttttttttttttagtgtgggatgggttggttatatagaagattatttagagaaaattttgaagtttaaaggttgttttttttagtaggtttattatggatttggtgtttattttagagtagtatttatagtatttttatatttattgtaaatttagtttggagttgttagtagggggttaatataagttttagtcgatataatattagaggtatttatatatgaagtttatagttgttgtatgggtatatttggtttacgtttttaaagaggtagtagttgttattgtagagagtatattgtttgttattgttggattattagtatggaaatgaggtatgtgtgtgataggtggttttataattaatataattaattttttttattagttgacgttttgataaaatagatgtagtattaataagtattttttttttttatagaaaaggaacgatatattgtaaattttttatttataaggaggagtaggataattttttttgtatatatagagtggacggtattggagtttgtttttgtttttttgaggtggttgtttattttttatatttgttttatattaatattgtaatgtttttataggttaattagggtttttgaagtttttaaaaaggaagttattatagaagaaggaaggggaaagttggaaaaattaaatgggaattttttgttttggaaaggaaatatatagatgattatttgatgtagttgttaagggaatggagtagattttagagttttgtattagtttttattagaagtattaatattaattagtagaattttagaatttggaatgttgaagaattatgtgttttaataggaaatgttgaaagtaaaatggaatattataatttgggtagagaaattgtttttagaaattttttttgtattttataaaggataataaagggaaatttaagatttgggattttttggatttttgatttatgaaaattatttagtagtgatgtatatttttttaattatgtttatatattttattttattttatttgagatagagttttattttgttgtttaggttggagtgtagtgatataattttagtttattataatttttttttttcgggtttaagtaatttttttgttttagatttttgagtagttgggattatagttatttattattatgttcgggtaatttttgtatttttttagtaaagacggggttttattatgttggttaggttggtttcgaatttttgattttaggttaggttcgttttggtttcgtttaatgttttgaagtatttttggatataaagttgtattttagtagaagtaatgaaattttaataattttgttgttattttaaaaatagaaatgtggatatttaattattattgtatatataagggagaaattcgttttttaaaatatagtttataaaagagtttaaatttttattataatatttttttagaatttataatatttattattttttttgtgttattgattttatatgtattagattaattatttagaaaaagttttttttatttattttaatggaaggttattaatgttttttgttgtgtggtttgaggtttttttgtagaagtttgattatgaaaaatttattaaatgttttttggtagatgaggagtttagttttgttttttgttttgatgttgagaaaggttagaaagtgaattttgtttttttttgtgaattgtcgtaggtttttagaataaatagatattgatgatttaggtttttaattttatttaatgagtttttttaagttttagttttattatttgtaagatgaaaataaaattatattttatgggatagttaagaggagaaattttatgtgatgacgtatgtaaattgattggtttattttaaatatttagtgattagataattttgaaggaggggtgggagagttttagatattagatattttaaatagttatttttgggtcggattttatggtttacgtttgtaattttagttttttgggagacgaaggtgggtggattatttgaagtcgggagttcgagattagtttgattaatatggagaaattttatttttattaaaaatataaaattagtagggtatggtggcgtatgtttgtaattttcgttattcgggaggttgaggtaggagaattttttgaatttggaaggcggaggttgtagtgagtcgagattgtattattgtattttagtttcggtgatagagtaagattttatttaaaaaaaaaataaaaaaaaataaaataataataataataataataaatattttttttttatagtagaattatttggggagtatttttaaattgtttttatttgggtttttataaatgggtgaaattacgaatttaggaagggggtttaggtattagtattaaagataaaattttttttagatgatttttatttgtatttagttttgagaagtattgttttaagtggttgaaattttttttttttttttttatttttagtttaatagtaattattttttattcgttttttttttgtatgtttttatttgttttattttagttagtagttttattttaggttttttatagttgaattgttgtaatttatagtttttttattggttttgttgattttaagtatttttataataattatatatattgtaagataaatatttttataagatatttttgattttgttataattttgttaataaatgttagtggttcgttgttgtttaataattgtcgtttaaattagggatttaaaaatatgatggaaataagtatgaatatatagaaattagatattgattagaggttatattgtgtgggttgaggaaatgtagattttaatgtttttttattgattattttttgattttggaaatttagtttattttttattgtttagtttttttataatgtttttttagttatcgttatttttggttggaataggaggattagtttttttggtttgttttatattgaaggtttttttaggatgtaaaatttttaatgttaaaattaagaaaattttaggtaaagtggtatgagttggttattttaggttgaaattttattaaattagtgtaataatttgtgggttgtgaattttttgttatagaaagtatataattatttgtgtaatggttaattgtttttgttagagtatatttttatatgaataataggttagtttggttgatttttttattttaatgttttagatatttaaaaggtttgaaattgtaattgagaaattattttgtaatatttatttaaatgataaagtttagaatgaaagttatttagttataattttttttagaattgttttggatttttatacgtttttatttatgatagaaatttttttttttgggttttttatggtttgttaggtgggatttatataatagtgttgtttttttgatttattatgttatatgtaaggtgatggaattaagaaatggttttggtattaagggaagtaggggtttttggtttatagatagttttataagttattgagatttataataaaataataaaagtgtattgtttatgataaatatttgtaagttaatggtaaaagttatttaaggtaaaattaaattttttaaatttgttttttttttcgtagtgtgtattgttatggtgatgagaaaggtttagattggaaaaggattaggatatgttgtttagggaaagggtattttttttattttttataagttttgtttagaatgtttatttttgaaataggttggaagttttttttattttagtttttgtggtgtttagtaataaaagttttatttttaattttttagtttttgtttatgaaatattttaatatagtttattttttaaaaatataaaaaaaattaaataaatagtttcgaaaatatgttaagtaaaagaaattagatataaatggttatatattataggattttttaatattaattatttagaatagataaatttatatagatagaataagaatgggtgatggttagaagttgggggaggggtaaatgggtagaaattaattaatgagtaaggggatttattttggtgggatgaaaatgttttggaattagatagaggaggtggttgtatatattgtgaatatattaaatgtttttgaattgtttattttaaaatggttaattttatattatgtggattttattttaatatattattttttaaattaatagagtaaatgttttttttttttatttatttattagttatttagttttttttttttagaggtaattaacgtatttaattttttgtgtttttttttagaaatattttatgtataattaaataaattttgataagttttgtttgtttttttttttatgtgaatagtagtatatagtgtatattattttgtatttggtgattttgtttgtttgtttacgtaattataaagtttggagtttaatatttaatatcgtttttatttttttttaatagttgtatgatgttttagtatacgtgtatattaattgagtttttattgttgaatatttagattatttttaatatttgttttttaaaataacgaagtaatgaggagttttgtgtatgtcgttttgtatatgagtgagtatatttgtaggataagtttttagaaataaatatattgtttgagagatatatgtatttgtaattttggtatataaaattaaattgtttggtttaaagtttgtattatttatttttttagtagtaatttataagaatgtttgtttttttataattattggtaaaatcgataattttttttaggattagaaatttgttatagtaatatagaagattgcgtattttttagtttttataaatttaggtttagtttagtttttttttgttttgttttattttgttttgtttatggatatattttagattggaattttttttttttttttttttttttatttttttaaatgaatttattttttaaatggttattgttttgaaatttagatggtttggttaatttttttgaatattaaatttgtgaatagtttttgtatgattttatttttcggaaataaaatttttaagtattgttagttttttttataggtcgattttatatatttaaatttaattaattttggataaaaatatttgaaaaaataaaaataaaaaaagaagataatataatttttaaaaataggtatttatatagtatttatattatattaagtattataagttatttagaaatgatttataggatatgggaggatgtgtgtaggttttacgtaagtattatattattttttattagggatttgagtatttgtagattttggtatttatgggaagttttggaattaattttttatggatatcgagagataattgtaattgttaataaaaataattatagatgtgtttttagtttagtaatggtaatgtagttttattagtatagtaaatagttaaaaattttagttttatataaatttaatttaataaatatatattaagtatttttttttttgtaagtttttgtgtcgtgttttatggatgatacgtgaggaataaaatatagtataaagtaggaatatgaaatagaatatggtaaataatttaggaggaaaaatggttttagaggaaaattgttttatatttatgatagggaaagatatttgggtggagtaatgagtgttatgatttatgatatttttaatgggtgaagatggggaatgagtgaacgaatgaatgatttatttttagaaaatattttattgtttttttgttgattttatttgtggtgacgaattttataatttttgtttttgattttaatatttaggttttatttaatatttttatttgttttttttttttatttgagggatttttaatatgtaggtattgatgagatgattttaattgaatttagaaaaatagatttagttttttatttattaatttatgattaggtagatttttaaaatttaatagttatttgtgattttagaatatttttgttaagtatgatatgaaggttaatattttaaaaatagtttttaaaaatattttagtttaaaatattttaatttttgtgttttatgaaattattatttgtttttagaaaatgtgttaaaaagtttaattaattattgtgttaaatttttgaatgggttaaaaatgagtgtaaaagttaaatagtaaagttaatggtgttttatagaaaatttttggaaatatagagttatgataggaatttagttaaaaataaatgtaattttggttggatttaagtaaagtttattgagttttaaagtaaaatgttagtgtgtttagtattgtgttagtttttagagttaaaaaaaataatttaaagttatttatattagaaagatatgatagtttttaaatttaaggaaaatttattgtttttttttagattaagattagggatttaatttaaatttattagatattttatatagatagaaaaattgatattgcggaaaattatttaaatgattgtatgttttgtttatagtttagaagaaaagatgaggtagttattttgtttttgttatgtgttggtattggaggatttttcgtgttttagatttattaatagtatgaattaagaaaagttagttaaattttaggtttaggttcggaaagggggtaagggtatattttatagaaagaaggtggtacgtagaatagttatagttaatgataaaaagttttagaattatttaaaaaaaatttggttgtgaataatatagttggtattgaagaggtgaatatgattaaagatgataggatagttatttattttaataattttaaagtttaagtttttttttttgttaatatttttgtaattattggttatgtagaagttaaattaattatagaaatgttttttggaatattaagttagtttggtgttgatagtttaataatttttaagaagttagttgaatagtttttatggtaagttttggatagtaaagtattaaaattagaagatattgatgaggaggaggaggatgttttagattttgtagaaaaatttgataaggtattaaagaatgaagttaaataaaattttggtttttggaagttggtatggattagatttaataaattagttacgtgattttaaagttttataaatacggagaatattatttgttattagtttagtaataaaattattttgtatattaataatgttgtttgtttaggattttttagttatttaattttgtattttgtattattttttaggattttttttggttaaaataggaagtattggtgtagtttaagggtgttttgggttttgatttttggtgtttttgttttttgtttggggtatttttggtgtatgtatgtttatgtatgtgtgtgggtatgtgtgtatatagtgtaagagtaaattggaaaatagttttatttatttttttttttttttagtagaaataaaaaaatttttattaaaaaaaaaaaagaaaaagaaaaagaaaagaaaagggtataaatgttttatttgattaaagtttttttaaaaataatgattaattagaggattaagttttttgtttttagaatatgtgtgggattatattttaaatatttatttttgtagatgtgtaggtggtatggtagggtagtgatagtaggggattcgggtttggtgtttttattagtagggtgttttttttatttgataataggaaaagttagtattttgttagatttgttttgtttttttttatatttagtaaatttggtttgtttttttttggaggttgtatacgtgaatattttttttttattttttttaaaggggggttatgtttattttttttttaagtttattatttttttaagttgtgttaaaatatatataataaaatttattattttaattattttacgtgtatagtttaattatgtttagtatatttatattgttatgtaattaatttttagtgtgttttattttgtaaaattgaaattttatgtttattaaataattttttatttttttttttttttagtttgtgatagttattatattattttttgtttttatgaatttgttatttttgatttttattagttggattgttttaggtattttatgtaggtgaaattataaggtattaatttgtgtgtgattggtttattttatttaatataatgtttttaaggtttatttatgttgtagtatgttagaattttttttttttttaatgttgaaaaatattttattgtatgtttatattatattttgtttatttgtttatttaataatgaatatttgggttgtatttatttttaggttattgtgattaatgttttaatgaatatgggtatgttgaatttatttttgattttaggtttggttatttttttgaatatatgtttattttgttttttggttatagtaaatttaggagtttttttattttagaaggggtaatgttttagggattggtgatgattaaatttacgtatttattttatttttttttggttttgatttgattttttaggttgtattggtagtataggatggtagttagtgttttttttgttttaggataagttgttcgggagtttttagtttttttttttttgtttttgttttttttgtgtattaagggaatataggtttaaattttagaaaataaatagttttttaggaaaaatgtttatttttatattgttattatataatgtttaagtttataaaatattttgtattttggtaatattaattttttaggttttataattatattaatgagggattttttttaatgggttggttggtataatttaattttatcgttttaatatgtatgatttaattatataagagttagttaatgagtaatggggaagaagttataggttaaaataaatggcgtttaaattaatggggaagaagttataggttaaaataaatggcgtttaaatgaattaagtattgttttttagatgtttattatttaataaagatttggtaagatattttttttattgggtatgaattatttagataaaaagggtaaattagggttatttacgtttagagtttgtatagtatgatttcgaggtttaatatttattagaagttttttagtaaaaggttaagttttaaagaataaaagggtttatatattagtattaaataatttttttagagatgtaaatttttaattagttattgtggtaattgtagaagtttagaagtaagttttttatataatgaatttgagagtttatttttttgatttattataggtttgtaagaagtaaggaggaggaaaataaatattgttttaattgtgataagagaataaagtgtaataagtgaagggattttatttttttgttgaaatttttataggtttaagagggatattatatttgatatatagttttgttgtaaaaagaagttaaatttttaaaggttttataaaattattattattataaattgatttaaatatagattatgtgttaatttatattgatatttttatttttttaaagtgaatatggtttaagattgttttaaaatagtaagttttgatggagtgtttttggtttgtttgttttattttgtgtgattggtttttgttttttttaaagttatatatggttttttaaattttttatttaatatagagaaaataaaatttatatgtggttgggatatttattggagagtaaattattttttatttattagagtaatatatgaaaagaaaggataaaagtatttataagaaagtatgagaatattaattttatgaagagagtttttttttggtttataaagaggaagagaaagtttgttttaatgtaattttttttttaattttaggattaattatttaaattaaaatttatagataaatatgtaaatgtttttttttatttttttagaagtaaaaaagaaaaggattattgttaataaatttgagtaatattttttgtgtggaatatgttatttttatttatttttttttttaaatgttgtaaattaaattaagagttttaataattgtttaataatttaaataaaattttgtaattttttggttatgtttgtttagattgtgaattttcgtatttagtaagtaagtaagtaattgagatattaaatgtatcgagagagggtgaggtttagatcggaaataaaggtaaaggaattttgtatggttttaaaaattttattaatattcgatgtttttttttttttttttttatatatagaagtttatttttttatttttttacgggatttttttaagtttcgaatttttttattttttttttttattaaattttgtatagtgttttatttttagtattttattttgtgttagaatattttagtttatatatatttttgtgttaagggaatgataatggtttggtgattaatttttagattagatatttagtgtttaatagaagtttttagatatatagaagtttagtttaaagaagtgattttattttatatagaataggaatagatatatatttggtttatgatatatttttgttattagtttatgtaagttttttttgtatgtatatatttgtttatttttattgaatagtttaataatgattatgaatttattatttaatatggaattagaattttgttaaaaatttttatgtatatagaatattttacgaatgtagttttttgttttatttttttttttttttaaattatgttaattattattttgaattttgttggatgattgtaatatttttattatatttatgtgtatttttaaaaagtatatatttttttaattttataattttgtatgttatttttggaaatttattttttatttagtgttattttgttaagatttatatatattattgtaatattgtaatttatttatttggtttatttaatattgtattgtataaatgtgttatatttaatttgtataaattatttgttattatgaaaaacgttaaaatttttttttatatgtttttaggtgtgtatgatattttattgggataggaagtgttaagtttaaagatatgtgatattttttataaaataattttataaattaatggtaaaagttttttaaattgtttgtttaatttatattttaatgaaaaatatataagagatatatattttatatttattgtattattaggtattgttagattttttttttttttgtaaaaagtaatgttagtataaggaattataatgttagttatttacgttattaaaatgggattgtttttttataatttaaagatgtagattaagtaaatataatgtttttttgttagtggtaggagatatgaggtataattattgatattttattttatagggattattttagtatatttaagagtttttgattattaatattaaaatattatattatatgttagtttttgaagttttattggatttattttttattttataattttattaggatatatttggtatttgttattttttttttaataggtttaatttgtagtatgttattagtataatggtttaatataatattatgtggattgtgaaggattgggggttttgaagattgtattatgatggtaagtaggagaattaattgtgttttggaaaaatagagtgaatatgtacggttgttattgttagagaaaggttaattttttttgattttttttgttgataaaataaaaaataatgtatttaataggttaatatgttgtgttgatttattgttttaaaaatattacgtttgtaatagtatttgtattgttttttttaaaaattagatagattatagtaaattattatagtgatttattattatttgttatgagttatttgttgttttttttttttgacggagtttcgttttgttgtttaggttggagtatagtggtatgatttcggtttattataatttttgtttttcgggtttaagcgatttttttgttttagttttttaagtagttgggattatagatgtatattattatgtttggttaatttttgtatttttagtagagatttgtatttttagtagagatggggttttattatgttggttaggttggttttatgattcgttcgttttagttttttaaagtgttgggattataggcgtgagttatcgtttttagtagatatatttgatttttgaaggagatagagtgattattagtattttttgatttgtagttgtattattttaatttttgtttttgtaattatattgttttttttttttatatgtgtaatttgaagtgttatttaaaagtggttggtaagttggaaaatattaagtattatataaatgaaagttgttattattataaatatttggtgtttaggatatagtagataagttggtagttaaaaagattagtttttatgtttatattttagtaggagaaatagttatgagtagataaataaggtaatttatattgtaaaagattggttgggtacggtggtttatgtttataattttagtattttgggaggttaaggcgggtagattatttgaggttaggagtttaagattagtttggttaaaatggtgaaagtttatttttattaaaaatataaaaattagttggggatggtggcgtacgtttgtaattttagttatttaggaggttgagatatgagaattgttttgaatttgagaggcgaaggttgtagtgagttaagattgtgttattgtattttagtttgggtgatagagcgagattttgttttaaaaaataaataaataaataaataaaaatttgtgataagtgggaaggaggaaaaaaattagataaggaaaatataaaaatgtttaggaggaatgtgttaaaatgatagatttgatagttagagaagtttttatagataagattagttttgaataaaaatttgaaggaagtaaagaaattaatttatgtagatatatgggagaaaagagttttgggaagagaaattgtaagtataatggttgtgatgtagaagtgtgtttgatataatttaggaatagtaaggaggataatgtgattggagttgagtgaataagggtaaatatagtaagaggagagtttagagatgttatgtggtagagtagagataggttagttgtagagaaattgtttttaattttgaatcggatgggaagttattaaaaggtttttagaaatttttttttattaaaatgtaatttatataaagagaaatatatagattatggtatgagttttggagggagaaaatttattatttatattttaataggtttattgtgattggtatgttgataataaatagtttaaggggaaatggtggtttgtattagggtagtaagagggtaatagtacgaaggggtcgtattttggatggattgaagtagagtttatatgatttgttaataaattggatgtgggaagagagaaattagagataattttaagttatgatttaagtaattagaggaataaagtttttattatttataaaatagaagtttttttttattgagaaggggataaatgataaggaataggttttgagttgaagttaaggattgtatttggggtatattaaatttgtaatgtttatgatatatttagggtagatgttaaataggtagatgtgtttatagttttgtagttaaagaatcgcgaagtaattgaggtgatgaatgaaataagtttggatggtttaaattagtaatttaaggaatgtttttaggttttttgaaattttagagggaggaatggtgaataggaattagggaaatgatttgagaaggagtaattaatgaggtgggagaaaaatttaggagatggtggtattttgaagttaattttgaaatgtattttagtgaaagagggtgattagtttggttaaaggttgtttatgaggttaggaaaggttaagattaagaatagattatggatgtagtaatgtaaaaggtattgtgatattgataatagtatttttggtgaagttgaaggataaaaatttgattggagtgtattaaagagaaaaattgatgttggggagagaggagataataacgatagaacgattttttaaggattttcgttgtaaggaaaagaaaaaattaataggtagtaattgaaagagggaatgggttaaagagggtttttttttttttgaaagaaaagagaaataataatgtgtttgttttttatggagtgatttagtagagagaaaaataaggatgaagaggaaggggagaagattgtaggagtaatattttaagtagataagagtagatgagatttcgtgtttttgtggaagggttagtttaagataggaaagagtagatagaatttattttttataataggaaggatgggagggtatttgggtttatagatacgtaaatgggtagaggttatggtgagggttttgtagtttttttttttgaatgtttcgttttagtttagtgaagaaagttgagagtgaagatgagaaaaatgaagatgttggagatttgaggatagttgagaaaatatgtgataaaggtttaggaaagttgaatagattaaagaaaaatagatttgttaggttattttaaagttttttgtaagattggtaattattattgtttggaagagtttttattatggttgaggcgttttcgttagttacgttgaattttattggtttttgatgaagttatagaataggtaatatattttagttattgtagaatatttttgatatttatttttagttttttttttggttattagaagttaaaaatttgtaataggttgggtattgtggtttatgtttataattttagtattttgtgaggttaaggtgggaggataatttgaggttaggagattaagatttaggttgggtaatatagtgagattcggtttttgtttaaaatatatatattttaaatagttagtcgtggtggtgtgtgtttgtagttttagttatttgggaggttgaggtatattttgagtttaggagtttaaggttgtagtgagttatgattattacgtaattgtattttagtttgggagatagaataagatttagaaaaagttttaataaaagtttaaaattaaaaaatttttttagttaattttataaatattagttggttagaattttttttttatttttatttttgaagtttttttgattgttttaagtgtgtttttataattttattttattgtgaatttttttagagttgtatttttaggtgatttatagatggtaatgtattaagaaggaagataggagagggattgaggagataatgatatagtaagttttggaaatggtaaatttgagatgtttatgaaatatttagttggagatgttgatgagataataggatagatgaatttaaagtttaggagaaagttttggggcggagagaaaagttaaaatatttttttggtatttatttgcggtagttgaatttatgagattatatttatagttgttgaaggtaataggtttatgagaaaaataaagaagttacggttggggatgttttttggggatattattatgatagggggagataaggaaggagaagagtttaaggagaagagatggaataattagagtattatgagaagagtggtgaagagttttgtagaagggggtgaagtaaagagttttaaagggagggagaaattaatagtttaaatatagtagaagatttatgtaaaaggtggagaaatgtttatagtatttagtttgatttttgtttataagagtagtttttagattggtttgagtttaaaatggtattttttattcgggaggttaaggtgggaggatcgtttaagtttagtagtttaaattaagtttttgtaatatagtgagtttttgtttttaaaaaatatttaaaaatttttaaaaagtaattttagttttatgaaatatatttgttttttttatttatttatttaataaatatgtattaagtaattaagtgtatattaagtattaagtattggtttaggtgtgtgtttaattataattaaattttatgttttatgagaagggaatatattaggggtgttatgggagtagggttagtatgtaagggtgtattttagggaaaagttgtgatttggaatttggagtaggtgagaagggttttatgagaatgagattttggggtagaagtagattttgttagttttaaagagtagtaggaagggagagagggttaggttatttaggattgtatgggttttttttaggatgtagatttttatattaagtgatgattgtaagtttttatgtagaaattttttgattttagaaatattagttggtgtgttgaatatttagtattttgtttttttataagttagataaatgattttttttgatgggcggtttttttgtgtgtattatttttttttttaagtttatttttaattattttttagttttttttgggtatttttttttagagtttggttggttttgatgttttattgttttggaatttggtttttaggtttattttatttaaatttagtgtttttttttttggtttagtttaatgatagttttatttttgtttagttttaagatagatggaaaaattataaaatatttagatttttttgagttttttgagtatttagtttttgttgatttgtgttatatagagacgttatagtagtataaattaggttaatggtttttttttagaagtgtttgtgttaatttttatatataaaaatgcgtattgtgtggttatatagtttatattttattataataattttatagtagtttgtaaatattaggtgtattaaagttttatttgatttataatttgtataaagttatgtattgattgaatatttttttttatataaatatttttaataatttttttattttttataaatatatagatagaatgttttgtttttatagttttggcgaatattatttagatttttgggaattataatggtagaaaatattgttgataatttatttttatcgtggtagaagattgaagtatgttttattggaaatatttagtttgcgggtttgaagttttatttttatgtttttttttttatatttaaaagttatatttaagtagtattagtaaaatgtaaaataaagtgtgagtgatgttatttttttttttaaaataaaatatatgataagttatagtattttttagttataaaatattgggattttttataggtatatttatttttatataaattgaagatataaatatttgaataattgatttatttaataaattttttttttttttttgagatggagttttattttgttgtttaggttggagtgtagtggtgcggtttcggtttattgtaatttttgttttttgggtttaaacgattattttgttttagttttttgagtagttgggattataggtatttattattatatttggttaattttttgtatttttagtagagatagggttttattatgttggttaggttggttttaaatttttgatatcgtgattagttcgttttggttttttaaagtgttgggattataggtgtgagttatcgtattcggttttaataaatatttttaaagtagtaatatgtttaaagtaatgtgttggatattataagggatataaagatagataggatataagattttttttttaagagtttataatatagtagatttatgtataaatataaataatatgtaaaagtaaaaataaaatggatatattgtaaatatttaatttaagaaaatgttttaatttgggtttaggaagttagagagatattttagatattttttttttatatataacgtaatgatatgaataattataataataataaaaaatagataaagtttatagaaaagtagattattagagattaaattttcggagaaggttttggtaattaataaaattgtgagatagaattttttagaaatgtattttgttaggtttgttattgttttattaataataaattttattaattataggattgggattaagagttttgatttgttgaaatttagataaattttattaataatttataatttagagaaagttaggaaagagaaagtaggttattaaagaagaaggtttagaaattgttagtagacgtataggattttttttttagttatttttatgtttgtttggagatagaaaagaaaaggaaaaaataataataataaataaataaaaaataaaatattgtagtttaatattttgttattttgtggagggaaggtagagggttaatattatttattgtttggggtaatgagtagaaatttagtttaaaaaaagatataatttgagggaatagatattgggaaaattgtttttgttttgttaattttataaataggaattgttttttattttttattttattttcgttatatatatattattattattattaattattttttttagatttttttttggggttggagagtaggtagttggggaaaaagagatgaaattaagaaagtgaaaagtttagatttttttttagagttattcgtattattttagagtaaaggtattaagttatatgatttgagagagtgagttaaagattgataaagattttgggtttatatggtattttttttatgtaagaaaatttaataaaattttagaggaggaaatgtaattatttttgtaaaaattatgataatgagaaaaattagatataggaaaattacgatagtgaaagaaatttgatttaattattatattttgtttttaattgttaagttgtttttgtttatttttaggtataggttgagttaattttagtaggaatttagtttatagtttaattttgaaattaagatgataatagttttttttttaaataaattttttttttgtttagggattagattattttcgtataattaataaattagttataagattagaaattatggtgtagaagtgatgtagttagaggtttcgagatttttacggataatatttataggattgttttttaattgtgtatatggatgatattattattgttaaatttaagattggtgttcgagatattttttagattttgttttttgatagattatttggtgttatttagattagtagatgagtttaattagttttgtgattttatttaggaattgaagatagtaagaagaatttatttttattttttgtgattttattttagatagaattaattattattttttattttttagttttttgtttattaaattatttttgataaattttaatttttgagtttttagggggattgatttgagtgataattttagtttttttacgtggttagtttttttttttattgaaatattacgttgttagtgaattgattttgtttttgtagtaagcgggaagaatttgtttggtgattaaagaaaatttaggtttattaattagatgaggtgaaaaggaatttaagtagaagattagaattgtgttgttaatattaagaattggtaagtaaagaaaaaagatagatatggtttttttgtatttatgtatttattttttgtttttggtagtaggagatagagaatatattgatagataaatataatttaagttagttaggaataagtgagatggagaaaagtgaagtagattttaaggaatataaattattttattataaagatatatgtatatatatgtttattgtagtattatttataatagtaaagatatggaattaatttatatgtttattaatgatagattggataaataaaatgtggtatatatatattgtggaatattatgtagttataaaaagtaatgagattatgttttttgtagggatatggatggagttagaagttattattttcggaaaattaatataggaatagaaaattaaatattatatgtttttatttgtaagtgggagttgaatgatgagaatgtatggatatagggagggggataatatatattggggtttgttaggggaatggggggtgggagagtattagaataaattgttaatgtatgttgggtttattatttaggtgatggattgatagtaaattattatggtataggtttatttatgtaataaatttgtatattttgtatatgtattttagaatataaaataaaattaaatttaattgaaaaaaaaaaaagtgaagtagaggagatggatggagaagatggagtaaagtgttgtttcgtgaagagtttttagggaaggtttttttgtaaggtgattttggaagagattgggttatgtagttatttgggaggaagagtatttttggtggaggaaatagtaggtgaagagggaatatgttagatatgtttttaagaattgttatggggagtagaattagtaagaggagagtgggagagaatgagttgggaggtattaggtaattagttttattagtgatgggagggatattggttaaggattttgttttttattttgagaagttattgagggttgtatagaggaatattatgatttgtttttagttgttttattaaaggagtaggagtggaagtaagaagataaatttatgaagttattgtaatagtttaggttagaggttagtaaattttttttttaaagagttagttagtaaatatttttggttttgtaaattatgtggttgttgtgataaatatttaatttttttattgtagtaggaaagtagttatagataataagtaaataaatgggtgtcgttagatttgttttttttatggttttggttatatagtttgtagatttttaatttaaatgatgggggtttagaatagaatggtagttatataggtgttaagatgtagttggattttgggtatttttgaaataataataaataggatttaataataggttttatttaggatatgaaagaatgaaaaatgttatggatgattttaagatttttgttttaagataataaataaataaagaatagagttattttagtatagttgtttaggttgtatgttgtatagagtaatatattaaagaggattttgattatattatagatacgtttatttgtatatttattattatatttttttattaaatagtattaaagtgttttttttaataaaatatatattataataattttttaaaagatggaaataaagtattttgaggtatattattattacggtagttagaaagtgttaatatttattttagaagtgaggatattaaaaagtatatgtgttacggattaatgtggaattaaattttttattttaatatattttttttttaaattaaaattaaaaaaataaaatgagttgtattattttataatttatggaatttaatttttgggcgattagagaaattaaattttttttttgtttttgtttgttgagttttttttgtgtgtttttgttttttgttttttttgtagtgttaagttaataaggttgtatttttaggataatgtatatttatttggagttttataaaattatttagtacgtagtattattaaaatttgtttttatagttttttttaaagaagaatatttgtaaaaaatttttttaaagaaagtatgttattttataaaagggaaaatgtgagagtgtaaatatataaagtattattaataaattaaagataaaaatgtttgattgatttattttttatttaatatttaaatttagcgagagttggtatgattaggttatgttattatttataaaatagaagaaaatgtttttttgtaaaatatatatatattatatatatttttttattttgtatgttatgaaatgtttttgtttttttgagagggggaaattattgttttaatgtggtgtatgaaatttgtatatattatatgatattttttttttaaaaaatttagaaaaaagatgtcgtttatgtgattaatagtttttaaatggaagtatgaaattagtgagttatttatttttatatttatttgtaagttatattagtatttatcgaaatatttgggtaggtaaattagtttttttcgaaaacgttatttggaaattttttgattttagaatgttttatttttaagattaatggtggatttttaatttattaaatggtgtaaataaaaattgttttttgatataataatgatattttaatattgttatatttgaaaaaaattttagggtaaggtatagtgagtggtttatatttgtaatggaggttaaggtgggtgaattatttaagtttagtttggttaatatggtaaaattttgtttttattaaaaatataaaaattagttgggtatggtggtatatatatgttcgtagttttagttatttgggaaggtggtttaaatttgggaggtagaggttgtagtgatttgagattatgtgattgtattttagtttgggagatagtatgaagttttgtcgaaagagagtaagagagaaagaaagagagagagatagagagagaaagaaaaaaagaaagaaagaaggaaagagagaggaaagaaagagagagagaaagaaagagaaagaaagaaagaaaaagaaagaaagagaaagaaagagaaagaaagaaagaaagaaagaaagaaagaaagaaagaaagaaagagagagaaagaacgaaagattttattggattttgtatttttattagtggttttttgttaggaagagtagggtatgatttgggaaagtaggttatggttttttttggttgggaaagtaggagttgggaagtagtttttggttagtttttatatattttattgtattaatttttttgggatgagatttaggtgggaatttggtaaaagttttatattttttttgattaaaaattaaattagatgaatattttaaaagagagattaagaaaattttatttatgttagtataaaaagaattaaatatttagtaataaatttaataaggaggtgagatttgtgtaattatagaatattgttgaaagaaaacgaaggtattaataaatggaaagatattttatgtttatagattggaagaaatattgttgttattattatttaaaatgatttaaaaatttaatgtaatttttattaaaattttaattatgttttttgtaaaaaatagaaaaatttaatttaaaatttatgtggaattttaagggattttaaatagttaaaattatttagaaaaaaaaaaatagagattttatattttttgagtttaaaatttattataaagttatggttattaaaataatgtggtattggtataaagatagatatatagattaatgtaataggatagaaattttagaaataaatttttgtatatatggttgaataatttttgataagggtgttaaggttatttaatagaaaaagaatagtttttaaaattggtattgggaaaattggatatttatatgtttttgtttttttgttaaataaaaaaaaaaatgaagttggatttttattttatattatatagaaaaattaatttaaaataaattaaagatttaaatgtaagtgttaaattataaaatttttaaaagaaaatatagggggaaagttttatgatagtgaatttggtaattattttttggatatgatattaaaagtagagataataaaagaaaattagaaaaattggattttattaaaattaaaatattttgtgtattaaaagatagtattaatagaatgaaaaggaaatttatgaaatgggagaagttatatgtaaattacgtatttaagaaggggttaatatttagaatatttaaggaatttttataatttaataaaagaaaaataatttaatttaaaaatggataaaggatttgaatagatatttttttaaagaagatatatagatggttaataaatatatgaaaagatatttaatattattaattatttggtaaacgtattttttttttttttaaattttattttaggttttgggatatatgtatagaacgtgtagttttgttatattgtatatatgtgttatggtggtttgttgtatttattaatttgttatttaggtttttaagttttataagtattaggtatttgttttaatgtttttgttttttttgcgttttattttttaagaggttttggtgtgtgatgtttttttttttgtgtttatgtgtttttattgtttaatttttatttatgagtgagaatatgtggtgtattgttttttgtttttgtgttagtttgttgagaatgatggtttttcgttttatttatgtttttgtaaaggatatgatttttgatgattatatagtattttatagtgtatatgtgttatattttttttatgggaaacgtatattaaaattatagtgagatattatttatatttattaggatggttagttttaaaaaagtgttggtaagaataaggagaaattggaatttttgtatattgttggttagaatgtgagattattgtgaaaaatagtattttagtattataaaagattaaatatagaattatggtatgatttagtaatttttttttggatatatatttagaagaaaagaaagtataaatttaaagagatatttgtgtatttatgtttatagtagtataatttataagaattaaaagatggaagtaattttattgtttattaatagattaacgaataaataaaatttggtatataaatattatattagtttattataatgttgttataaagaattatttgaggttgggtaatttataaagaggtttaattggtttatagttttgtagtttgtatagtaagtatggttggggaggttttaggaaatttataattaaggtggaatatgaaggggaagtaagtatatttttaaatgattagtaggagagagagagtgaagaaggaggtgttatatatttttaaataattagaatttatttaagagattagtaagggggaatttagtttttatgattttaggtttttttattattaggttttttttattaggttttttttataatattaaagattataatttaatttgagatttggttggagatatagagttaagttatattatatatagataaatatttttgagttttaaaagggaaggaaattttgatatatattataatatggataaattttgaggatattgtgttaagtgaaattagttagttagaaaaggataaatattgtataattttatttatttaaggtatttagagtagttaagtttataatgttggggttagagtatgatattttaaagtatggtattttggtatgttgaatgttttgaataaaaggaggttgaaaggttttagaaatagtttttttgatttttttttatttttttgtttttcgttttttttttttttataaagtgagttatagaaattagaattttttttttttaaggtgggttatagaaattagaatttttttttttttaagtaagttataatttagaaaggttatttttttttaaagatttttattttataggggttttatttaagtttaggatgaaggtagattatatagagagattaagaagaatttgaataggtaggttttgttgggttttttttttagtttattattattagattatattttttggtttagtgatatttttatatggttgtttattttttattgattttaagtataaaaataggtagttttttttggatttttgggtttttatttttgatgttttttatgttatataaaattttgattaaataaatttgttgtattttttttttgttaatttattttttgttataggagtgttgacggtgatttttatgatgggtgagaaaaggtattatatttttttgtttttttaatagatatagaaggtagaatggtggttgttaggagttggggggaggggggaataagaattattattattattttttagatagagttttatttttgttgtttaggttggagtgtaatggtatgattttagtttattgtaatttttgtttttttagtttaagtaatttttttgttttagttttttaagtagttggggttataggtgtttattattatatttagttaatgttttgtatttttagtagagatggggttttacgatgttggttaggttggtttcgaatttttgattttaggtaatttattggttttggtttattagagtgttgggattatagtatgagttgttatgtttagttaagaaattgtttaatggagatagagttttagatgaggaagatgaaaaagttttggagataaatagtggtgatagttttataatgatatgaatgtatttaatattattgagttgtatatttaaaaatggttaaagtggtaagttttatgttatgtaaatatgttatttaaaaatggttaaaatggttaggaatagtggtttatttttgtaattttagtattttgggaggtcgaggcgggtggattatttgagattaggagttcgagacgagtttgattaatatggagaaatttcgtttttattaaaaatataaaattagttaggcgcggtggtatatgtttgtaattttagttatttaggaggttgagataggagaatcgtttaaattcgggaggtagaggttgcggtaagtcgagattacgttattgtattttagtttgggtaagagagtaaaattttgttttaaaaaaaaaaagggttaaaatgtggttgggtagaaggtttatatttgtaattttagtattttgagatagaagtattttttgagtttaggagtttaattagtttaggtaatatggtgagattttgtttttataaaatttaaaaaaattagttgggtatggtggtgtgtatttgtttttaggagttagaggttgttgtaagtcgtgatcgtattattgtattttagtttggatgatagagtgagattttgtttttaagaaaaaaattaaaaataaaaataagaaaatggtaaaagttttatgttaatgtatattttattataataaaaagaaaatgaaaaaagttgtattaaaagatcgagtgttttttttttttagttgaaaattgtaggagaaaagaatggtggaatttagaagttataagaaatgtttaggaaaaaaatatgattaaaagtttatggttttgaagttagttaaaatgtaggtttttttttaagattggagttagagataattttttttataatttttgttttttggtatagattgtatagttgggttaagtgtaggagatgggggcggggggatgtaattttttttttttgttaatgttaatggtttttttatagttgtagaaaagtgattaagaatataatattatttttaattagtttttttaagtaatttgtatttaaagaatagtaaaaattaaacggagttagtaaaatattggttgaaaataaaagaggggagttggtgtttggttggtaagaaagtgttgtagttaaaagtaatttgattaaattaatttgagttagttttttttttgtgatttatttttgttgttattttttgaattttatagaattgtgagtttgttttttttttttattgcgtttttattatatagtaaagttttttttttttgttaggttggatggttttattggtgtggttatgataatggatgtttattttattattataaaagggtttaatgattaaaaggttatattatagtattggattataaaattttttggattttatgaagtttttttgatttaaaatgtttttttgataggattaagagtagtttttattttattgggttgtagaaatatttgtattttttatttgttattttttatttagtgtatatagttaatgtgtaattgatgaaatatttttttttcgagtgatatataattaagttagagtttttattaatttcgcgttggttttaatagagcgggttgtttttgtatttttgtatttttatttagagttggtaagaaaatcggttataggtttatttagttagtttacgttttaattttttttttttttttttttttttttttttttttttttgttttttggtggtggtaaggtgggggcgggggtaggggggtagtaagggaatgattaaaaaaagtgagtttgggggaatagaagaaaaaaaatttatataggaataattattgattttttttttttttgatattattgggagggggtgaattaaatatataaaaatattaaagttggatgaggagagagttgaaatatagtagaggaaagagagagagaaggaggaagagaaggagggattaaaggagggagggggaaggaaggaagggagggagggaggtaggaaggaaggaaggaaagaaagatggtagggagggagggaggagatagggaaggaaggaagggagggatgaaaaggaaaaggaaatttattttaatatttatttgatttaaaaagagtagaaagaattttaaggtcgacgtaggtagatagttagtataggtagttagtgtggtttagggttatgtaattattgtaatatttttattgtgttattagattaggggttttagtagtgattggtgatttaagagatttgatgataaaattatattagagtttttttaagtatttgtatagatttgatagtaggtagaattggaaaggaggtattttattgaatatttttattggaatgtatttgaattagtgttttttttgagtgtgataggtttgttattttagtttatgtgtattgtgttttttttaagtagttttaaatttggattatttgagaatatttataattattttttagaagttgttgaataatagtttttgaaagttaaatgtttttttaagatatattgtgtaattttgttttgtgataggttagttaaatgaatatgtttttatttggaaatgttgagggaattgtatgtgaaaataaatgagtttgattttatttttaggttatatagtaatttaaaatttagtttttgtaattgtaaagagttttttttttgatttttttgatttagattgagagaattttattaaatattgagtatttagaatatttaattgaattagaaagagttgtagtgttttgatattttatttaatatttaaatattttttttatttaaatatttttattttgaagtgaattaataattagaaaataatataaatgagttatgtatatatttgattttgtagtagggtttaagggttatttatgtttttattttttttataatttagttgagattgggtattatttgttattttattgtttgagaagtttttagtaagttcgtatgttaaggggtaaatgggaattttttaagttttacggtttttaaatggttttataatattagtaaatgtttttattagaaattgtaatttaaaaaaaaaaattattaatttttttttaattataacgaaatatgatggtaaatgttgtgtatgttttttttattagttgtgaaattttagtaaatatttttttgaaataaggttgttttatttgtaaagtgagattaatagtattcgtaaaggatttaggtggtattatataaatgtaaaatattgttgagttttttttttagtaaggaaaatttttaaagaatattttggaagaatggagtattattgttatttgatttgaatattttttaatattagggtttagtaaaggtttataatagtttgtatttaatggttagtgttttatttgattttggaatagcgtttagtttaaattttttttgtgatcgggtaggaatttttttttttttgaattaagtaatttgtttaaattttttgggttagggtttttttatttgatatttagttgataaaaaatggttgacgtttattagaatatatttattgtgttttaatagtgggtttaaattattataatggagttatgaagatattaaaatttatatatatttattttatagtttagataatagtaaatgattttttattttataaatatattttatatatttagagttataaaagttattgttaattttttgtttatgatttgtaaagaaaaaaggaatcgttagggattttatattatattaatttttgagtaatgttataagtaaattgtattgatatattgaaaagtaaattgttttggggataaggtattttttttttttttagttgaaagtgttgtgattagttttggaaaatgaataattagtagaatttattggtgtgttttaaaataattgatgatggttattttacgagtaatcggattttttaaaatattgggaagtttttatttttatggttttaatttaagtattgtttgcgagaaaataaaaatagatttattaatttaatattttagtatgtttgatatgaagaaattttgtttttataagttatttgttagattattatttgtttatttaatatgttaattaagataatttgatattatttaggtttgatgttaattttatttaaattagttttttttggttgggttcggtggtttatgtttgtaattttagtattttgggaggttaaggcgagtagattacgaggttaggagatcgagataagtttggttaatatggtgaaatttcgtttgtattaaaaaaatataaaatattattttggcgtggtggtgggcgtttgtatttttagttattcgggaggttgaggtaggagaatggcgtgaatttaggaggcggagtttgtagtgaatcgagatgcgttattgtattttagtttgggcgatagagcgagatttcgttttaaataaataaataaataaataaattagtttttttattttttaattaaaattaaaaaaaggagagttgggtggggatatataattttagattttaggtttttgtaaatttatatataattgatatttttatgttatttggggagagttgatattgaaatttttttgaattatagagtatttttttagttggttaaattgaaattttttattgttaagtcgagattagtttatattttgaggtatttaaataaagaacgaaaggaaagttttaaaagaaattttttatttttgattttaatgtatacgaaggttaggagaggatataatgtttgtagaggggattaattttttgttggtttttttatatttgagaatattgagttttatatttttatttttattatggtaggggcgggggggcgggggtggataggatttttttagagttgaaattttgttagaataatttagaataattttttggtaataaatgttgaaagtatagaagtatcgttgaggtgtaatgtttgtaagttttacgtttttttaaaggtttttttttagatagaaaaataaaagtagaggttggggtggatagggtagggggtgtttttttgagaaagtaaaacggttaggatagtgtagtttttaaaataaaattaatgataaaataattttatttttatataaattttatagttattgatttatgggttcgtttagataaaatgataaaataattttatttttatataaattttatagttattgatttatgggtttgtttagataaaattgtggttttagagtttaggatttttggaattaattaaatataattgataaaaattgaattttttaattttttttttagaaaaggggggaggggtgtagaaatatgtttttttttggttttttttaaaaaaataaattaaaaaatttaattaaataaataataaaaaatagcggtagaaattgattttaggtgtttgatgaatattaaaagggttttttttgtattattgtttgtaaagtattggaattatagtgagttagtttaatttattatatatatagtttaattagtaatatgtttgtttttgttgttttttttttttaggttataaaattttagaaggttaaagattgtgtttgtttattatgtttggtgttgtattaaatatagtattatatatagatgaatgttaggtaagtgtttgtatatagttgagatgtggcgttgatggaggtggttgaagtttgttttgttttagttggttagttttgtgttgagtaggttatgtttaagtaattattagtttaaatttaaagttgattaatttataagttttttttaaggtgagttagttatttgttttttaggtttttaacgacgttataggtttggtttttgtatacgaaagttagagagagttaattattagtaagtgtgaatgatgtttaaataatattattagattgtgtttatttaaagtgttaaagtgaattgtttattagtatttttgagaaatattcgaataatattaataaggggtgttaaattattttagattgttggtgagtttttgtttaaggagaaaaaaaaagtggggggggttttttggatgacggttagtgttttttttatttttataggtataattaaaataaaatgttggaaagagagtaacgggattaggagagttttaatttttttgtgagtttatttttttttgtttatatgtaaggagtttggaggagggaaaatgaatgtttagtggtttttaattttattttttttattaaaatgttatatttttttttttttagatgtatttttatataggtaatgatgagtttttagttttacgttatttgtattaagttttttaatttgttaaagaattttgttttttaaattgtatattattaataatgtaaaatataaaaaatgtatttttttgatatattttgaaggaaaaaaggttaagtatgtagtattagagttataaattgggaatttattttgttttaaggtgttttgaaatatatgattatgaacgtaattttgtttttgaatttgtttttatgaatttagtaattagtaagatattgtttgattttggaatttattagtattgtagttggaaaattgttttatttttaatataattataattatttttaatatagtagaattaataattaaggtgataataaataaattaatgtaatttttttgtttattatatttttttaaggttgtattgtgtttaattagatagtgttttatattagaaatgtttttgtttttaagatagtattattatatttattttaatataaaggtagagtaaattttagtttagaaaaattttgttattatttaagttatagggagggttttagagttaaggttttttttttatttgtttaatatgtagtgttgtttgtaaagtgtaaggatgagaaaaagttgggagtcggtaggtggattttagagagttttttttcgtttttaaatttttaaagtaatttttttatattttagaattttatttaaaatattacgtgtagtcgggtgcgttttagttttagtttagtatttggtaaataattttaattttaaaattttttttattaatggaataattttgacgatttttgtcgttttcgttatttgttgtaagagtgaatttagtttatttagaaatttattttttcgttttgttttagggttaatttttttttttattttatttatttttgtttgttaatttttggtattgttaaaaattttatgtatgttttgtgaaagaatgttagaatttaggttagatttttattaggaaagtcgagttttgagttaaagttataatgtatttttttttgaaagttaagttcggtttattaaagggttttttttgtgagttttgtgttaagaattgtttagttttttttgattgagaaagtatgttatttgttatagtaatttttttttttattttttttaagttttgagttgttaaatattttttttaaaattgatttgataaagttgtttttttttatttattgtacgtagatttttttaatatttaatgatataaattatgttttttgatgaatattattttgtagagtattatttgttgggtttcgtgatatagtttttagtttttttaaattttggaggtttttttttgggttagttttgtttgttaatgttttttttagatgcggtggtaatgttaagtatagagttttattttggggttgattagtttatgaaggaagttattattttttttttagttttgaatattatatatatttattgatagagtttgattgtatttgttttaaggaatgttttagttaagattgttttaggaaatagatttgagataagagtttgtatatagataagaggttgtgtgtagatgttgtatttgggggaagtagaattaaaataaaatgggaataagtaatgaaaagaataaaatagaataaagaatagttaatataggtgtaggagaggaaaaaaaaatgtttttttttatttttttacgttgtttggttgatttgtgattaaattaatatgagataggttaataggagaaaaatttaaaaataagacgttgaaagaagtagttggatgattgaggtttaaatattattttgagttatcgaaaggaattggggtttaggtttttaagacgtggtgggggtaaattatgggaggatgagggaggaaatataggataaataaaggttgtttggttataaagataaaagttttttagatgataaaagttgttttggagtagttttttttttggtagatatttttattaataaaagtttttttatagatgtgttaaattaagtttagtttaaagttgtttttttatatattttaagtttggtataaaggtttttttgtatattatgaattataataagtggagatgtaaatagattttagtttatatttgtgttaattattaaattttggttaattaaatgtagttaattgttttaattatgtttaaattgttaagttataattaatttagttgtttttgtattttatttttatttttcgtttgttatttttttttttttgtttataaattttttattatatggttgtattggagtttttgagtttattcgggtttgggagttgtttaatttataaatcgtttattttttagttaaatttttttgaatataattcggttgaagtttttttttattagatataaattttttttatgaaagggtaattttttagttatttttgtgtttgtagtttttttaaatagttagtttaaaataattaatatgtttaagaggtatattttgaggtagtttattttggttttttgtagttatattttggggtggtaagttttgagttttaatataaggatgtaaagtttagttggttattattgtggattttaggggttttgtttggttaggattttttgaagagttgtatagaatgtatttcgaaattttttgttagggaatagaagaggagtataggtatttattggattttatattttattgatttagggttagtttagggggtgttaagttttttttatgtttatgtatgagtaaaattatttttgttattataggagttttggtgtaaaatataagatatgagaggtatgggatattttaggtgtgaagttgtttattaatagtaatagtttaaggagaaggtggtttgagaggaggtgaagaaggataaaaggtgttaggttgaggtaattgaatttcgaggataagttatatttaatttgttgtatatattaattttatgagttttttatttatggattgtttggtttattgttgttatttgaaattatataagttttagaattataaatatttttgggatagattggatttttaagattattttagatatgaggaaattgaggtatagattgaggaaatagtttttttaaggttataaatttattttaaataattattttaattttttattttgttttgtggaaattttttataatatttattgagaaatatttattaggtttgtcggatatatagtattaaacgggatttaaattttattaattttattagaaatttttttttggagttttgttttgttaaattaggtagaaagttttttagtttattgaattttatgtttgtgttcgaatttgttgttaggagatgtaagttaattattgttttgattttgtttttttttattttttaataaattattttaaaaatgtattttacgttcgtttgggtttttttattgttgtaaatttgatatttagtaatttagatagttacgtttttagagtgggtgttttaagaatagaggtagttgggagagaggttaggagtgaggattgtagacgttgggatgttttttagtgtggtttaggggttacgtgtttggggtaagtaattaagtttttttaagtttttttttttttatttgtaaatggaggtaatgatagtatttattttatagggttattatgatgttttaatatttgtaagttttttagaatagtgtttgatatataataagtttcgttaagtaaaataattaggatttttaatatttgtttttttgagggagggttgtttgtttgttttatattaataaagtaacgttttttatttaaaattttgtttttttaggtgtggaaggaggatatttttgtggttgtttattttatatatttagattgtattatattgtatattttattttatttatatttatggtattattaattttttagtttagtattaagtatagttaggttatttttttaagaggatttgggttttgaaaataatgtttgtttaaaatgttttgtatagttttaaatagtaattaatattttataaaataaataaataataaatgaataacgaatatgagttgaataaaatagaagaaataaatatgtttgaattgtagtatttgatataattttaagttgtattaattatttggatggggtattgtgttgatggtttttttaaaatatgttaggtatatttgggttgaaaaatgtatgtttttagattagtgaattttttttaatataattatgatattttttttattaaatggagattgtagtatttatattattttttttatagggtttgtaaaattggaaatgttttttgaaaaatgtaatttttatattgttaattagtatttagtttttgtaatatgatttaaaaatcggtattaaatattttataaattttaaaatattttgtttgtaaaagttattatttgtgaatggatggatttacgtattttttattaggaggagaatgcggttatattttttttagaaagtttaaaagttgcggtgtttttttacggataattgtaattaggatggttagagttttataagttgttttagtaaaacggagtaatttagaaatttattgtgtattttttgtttttatttgaaaagttttgataagatagagtttgtaggattattttatgttttggtttttttattgaaattttcgttattttttttttttttgtttgagagggagtaacggtttagaaattcgtaaataggtcggttgttttaaaggaaattttgtagtataatgaagtttttacgtcgtcgggtttcggtttgttgggtttaggttattgaaagtagtcgttgggtgaattttttagtttttggaaattgttttagttttgttaagtttgtttaagtgtattaaggttgtttgtaagggaggattttagttgggtgggtttgttttttttttaggagtttagaaaaggtgagagggtttttttatatgtttttttgagtttcggttttttttttttttttttgaattgatataatagtttttttagtaggtttttttgttagggagttttttttttcgtattttttatattggattttggtttattgtaattttttttttttgggtttaagcgatttttatgttttagttttttaagtagttgggattataggagtgtattattaagtttagttaattagtgtatttttagtagagatggggttttattatgttgtttaggttggttttaaatttttgattttaggtgatttatcgttttagttttttaaagtgttgggattataggcgtgagttattgtgtttagttattattaggttttagaagggtatgattaatttaattttttttagatttttggtaagaagtagggattttgttaaggtaattattaaaaaatagtagataggttttagtaatttagtttagttgattttatatttgtgtgtatgttttattgaagtaagaatttagaagagatagatttatagaaatttttttgtattttttttataatttttaatttggggttaaaatatttgtatttttattaggtttttgaaggtaagtaaattatataatagaatattttaattataaaaattttgtggattattttttaaaggttattgaaaaattgataaatttaaagtaattgttaatttttttgtaaagatatatatgtggaaattttaaaggattttaaataaaggaagggagaaaggataagttattaaaatgatattatgtttaataaaatgatgaaaattttaagaaaatatataaatatatatttttaagatagtggtaatataaaagtaggaatgtgaaatttattttaagaaattaatagtaaattttgttttgtaaataaattaatataaatgttaaatgttttgtttataagaatggaatagaagttaatttaattagttattttttatttaggagtagaatataggaaagaaaagtagaaaggtgagtttagagataatgaagttgaatgagaaatataaaatattaggaaataaataatttatgtaaaattagttaatgcggtttttattttaattaaagattttttgagttagtagtgtattaaaaatgtaattttttggttgggtgtggggtttatgtttgtaattttagtattttgggaggtcgaggagggtagattatgagattagaagtttaagattagtttggttaatatggggaaattcgtttttattaaaaatataaaaattagttaggcgtggtggtgtatatttgtagttttagttatttaggaggttgaggtaggagaattgtttgaattcgggaggtagaggttatagtgagtcgagatcgtgttattgtattttagtttgggcgatagagtgagattttgttttaaaaaataaaaataaaaaaatgtaattttttatttttttttaaatattttttattttaggttataattgatatattaaggaagtgaatatagggaatcgagaaaggggataagatatagaaggaaaaaataggatttaaaggaataaaagaataagttgaaaaattgattaaaatatttagttttatatttgatgagatttttttatttttttttttaaaaataattaggaataggaaaaaaataattagtgtttttatattttatttgagaagttttaattgtggttttgaagaaatataagtttgtaattttagtgttttaggaataaagatatttttatttattattatttagaagtttgagtatttgttaagatcgggaagttaaatttgagatgttatattatagattatatacgttgtaagttaggttttaataaattttttatttaaatttttattaagtttttttttttaaaaattaaaaatttatagtgttaagtttttatgaatttttttatattttaatttatgtttatataaaaatatatgtaaatatgagtatatgtaggaatttttttttaaaaatagggttaaattatatatataattttgtaatttgtttttttcgtttaataatatattatgggtaatatattaatttaatattttaatagtatagtatttagtagtgtgaatgaattattgtttatttaattatttttttaaagatagatatttagtttgtttttaattttttgtttttggttaaatgattttgttattgttaaatgatattgtaatatatatttttatatatgattaggattttatttttttaggatagatttttagaagtagaattgttagattaaaagaaatgtgtattttaatgttaatagatattatttaattttttttttttaaatttgtaataatttatatttttataggaagatatgagagttttattttttttatatttgtattggtgttggaagcggtagttatttttaatttttgtttattgagaaaagtggtatttaattgtttttttaattgtatttttttgattattagtgagattgaatatttttttataagtttaatcgtattttgaatttttttttttgtgatttaattgttttttaaattggtggtttgttttttgttttatttagttttatgtgtttttgtatattaagtttttatttgttatttgtgttgaaaatgtttttttaatttatttattttttttttatatttaatttattaatttgtattttaaaattatattttgaatttgattattatttattttttttattaagaagtttaaattatcgttatattttatttgtattgttgtgtttgtttttaaattgagttttttaattttattttttatttttaacggaatcgtgtttttaaaatataaattagatgaagttatttttttatttaaaattttttaaagattaatttttattagcgtaaaaattgtaaagttgtttttttgtttttttgtttgttagtttgagatagggtttcgagttgttgtttaggttggagtgtattggtatgattatagtttattgtaattttaattttttaggtttaagtaatttttttatttggttttttgagtagttgggattataaatgtacgttattatgtttaattaattttttattttttaggtttgttagagatgaggttttatgttgtttaggttggttttaaatttttgggtttaagtaatttttttgttttagttttttaaagtgttgggattaggttgagttattaggtttagttttatgaaagtttttattttggttttgaaggttttatagtatttagtttttggttttttttttagttttattatttattttttattttttttttattgatgtagttatattggtttttttatttttttttatgtttgttaagtatgtttttgttttagaattagtttgaatatttttttttaaatatatgtattatttaattattttaagaaatatgtttaaatttgattattttaagtaaaatagtattttttattttttatttttttgttttgatgtatttttattattagtatttattatttgatattatatatttatttttgtttattgattttttgttttataagaatgtaaattttaagggattttgtttattgttgaatttttatgtttagaaaagtgtttcgtatatagtagatgtttattaaagatttgttaattgatatgaagtagattaaatgaaggtatattttattatataaaaatatattttatttagttaaatatgtttgttttattttcggaaatttttgggttttttaaagggtttttttggaatgtatatatatgattaatgagaatgtaagttagtttagttattgtggaaagtagtttggatattttttaaataattaaaagaattattatttggtttagtaattttattatatatatatatatatatatatatatataaaatatttaaagaaaaattattttattaaaaagatacgtgcgtttatatgtttatcgtagtgttatttataatagtaaagatacggaattaatttaggtgtttattagtagtggattggataaagaaatgtggtatatatatattatggaatattatttagttattaataagaatgaaatgttttttgtagttatatagatgtagttggaggttattattttatgttaattaatatagaaataaaattaaatatagtttgtttttataagtgggagttaaatattgggtatatatgaatataaagatgggaataatagatattggagataagaagagaggggaagaagagaggaggatgagggttgaaaatttatttattggttattatgtttattatttgagtgataggattatttatattttaaattttagtattatataatatttataggtaataaatttttatatgtatttgttgaatttaaaataaagttgaaaaaataaaataaaataaataaataaataaataaataaatggtttttttgattattatggtatatatatttatagttatttaattttttttttttttataatttttattttttatttttttttaattaaatatttaatttattttgtttatggtgtgaatagaggttttatttttttttttttttgatagatattaaattatattagtagtatttgtagagttaattatttttttttttttaaattatgtatttttaataggggttatattgttttttaagggttaaaaacgagttttgggtggattaagaaatttaatgatttattgcgatttattttttttaggtataaattatagatgtttagtattttaagattttgttgaagttgtttattagtttatgtataaagtatataagtagatatatagataataaaatatataagtagatatatagtatattggtaatattataattttgtaaagtgaggtaattaggataaaaacgttatattatattgttttgattatatagggtatatagaaagtttgagtatttattaagtatgttttattttgttttttgttttttgtttttttggtttttttggaatatgttttattatatgaattttaattttatttgatttttttttaaaaaaaatagtattttggttgaaaatgagttaattatttggagatatttgatattattgttattattgaagttattttatttagaaatgttgtatgagtttttattggtttaggtttttatattggtgtttttataagattttataattggtgttttttgaaaagtttatagatttttttatattagtttttgttatatttatttttaggtatttataatgttttgttgttattgtaagtgtgatttttatatttttttaattaattttaataagtgtagagaaaagtaatttttgtatttattttgattaatgtgatattagatttttatattattattaataattttttggttattttttggattttttagtatattgtgtaaagagatataattttgttttatataatttatatttatgtatttttagtatttgttttgtgtgtatagaatttagttttttttaggagaataattttttttattaattttaatgatattttttttttttttttgtattattatattttaagttttgggatatatgtatagaacgtgtaggtttgttatataagtatttacgtgttatggtggtttgttgtatttattaatttgttatttaggttttaagttttatttgtattaggtatttgttttaatgttttttttttttttgttttttatattttgataggttttggtgtgagatattttcgttttcgtgtttatgtgttgttattgtttaatttttatttatgagtaagaatatgtagtgtttagttttttgtttttgtgttagtttgttgagaatgatggtttatagttttatttatgtttttgtaaagaatatgaatttatttttttttatgattgtatagtatatatgtgttatattttttttatttagtttattattgatgggtatttgggttggttttaagtttttgttattgtaaatagtgttgtagtaaatatacgtgtgtatgtgtttttatagtagaatgatttataattttttggggatatatttagtaatgggattgttgggttaaatggtatttttggttttagatttttgaggaattattatattgttttttataatggttgaattaatttatatttttattaatagtgtaaaagtgtttttatttttttatagtttttttagtatttgttgttttttgattttttaatgattgttattttaattggtataagatggaattttattgtggatttgatttgtatttttttaaggattagtgataatgagttttttttatatgttttttggttatataaatgtttttttttgagaagtgtttgtttatattttttgtttattttttgatgaggttgttttgtttttttgtaaatttgttaagttttttgtaggttttggatattagattttttttagatggatagattgtaaaaatttttttttattttgtaggttgtttgtttattttgatgataagttttttttgttgcgtagaagttttttggtttaattagattttatttgttaattttggtttttgttgttattgtttttggtgttttagttatgaaattttttttgtttatgtttatgttttgaatggtattgtttaggtttttttttagagtttttacggttttaggttttttgtttaagtttttatttaggtaattttgtataaggtgtaaggaaggggtttagttttagttttttgtatatggttagttagtttttttaatattatttattaattagggaattttttttttattgtttgtgtgtgttaggtttgttaaagattagatggttgtagatatgtggtgttatttttgaagttttttttttgttttattggtttatatattagttttggtattagttttatgtttttttagttattgtagttttatagtatagtttgaagttaggtagtatgatgtttttagttttgttttttttgtttaggattgttttggttatatgggttttttttttggttttatatgaaatttgaagtcgttttttttaattttgtgaagaaagttaatggtagtttgatgggaatagtattgaatttataaattattttgggttatatggttatttttataatattgattttttttatttacgagtatggaatgtttttttatttgtttgtgtttttttttatttttttgagtagtggtgtgtagttttttttgaaaaggttttttatattttttgtaagttgtatttttaggtgttttattttttttgtagtaattgtgagtttatttatgatttggttttttttgtttattattggtatatagaatgtttgtgatttttgtatattaattttgtattttgagattttgttgaagttgtttattagtttaagaagttttggggttgagacgatggagttttttaaatatataattatgttatttgtagatagagataatttgattttttttttttttatttgaatattttttattgtttttttttgtttgattgtttcggttagattttttaatattatgttgaataggagtggtgagagagggtatttttgtttcgtgttagtttttaaatggaatgtttttagtttttgtttatttagtatattagttatgggtttgttacgaatagtttttattagtttgagatatgttttattaatatttagtttattgagtgtttttagtatgaaggggtattaaatttaatcgaaggttttttttgtatttattgagataattatgtgggttttgttattggttttgtttatgtgatggattatgtttattgatttgcgtatgttgaattagttttgtattttagggatgaagtcgatttgattatggtggataagttttttgatgtgttgttggatttagtttgtatgtattttattaaggatttttgtattaattttttttagagatattggtttgaaattttttttttttgttgtgtttttgttaggttttggtattaggatgacgttggttttataaaatgagttagggaggagtttttttttttttattgtttggaatagttttagaaggaatggtattagtttttttttgtatttttggtagaattcgtttgtgaattcgtttgtttttgggtttttttggggggtagtaggttattaattattgttttaattttagaatttgttattggtttatttagggatttaattttttttaggtttagttttgggagagtgtatgtgtttaggaattattattattgtgtgggagtttaagtttttttataggtttttaggaatttgttttatgaatttgggtgttttcgtattgggtgtatatatatttaggatagttagttgtttttgttatattgatttttttattattatgtgatgtttttttttgtttttttgatttttgtttgtttaaagtttgttttattagagattaagattgtaatttttgtttttttttttttttttatttgtttgttaaatatttttttatttttttattttgaatttatgtgtatttttgtatatgagatgggttttttgaatatagtatattgatgggttttgattatttatttaatttgttagtttgtgttttttaattggggtatttagtttatttatatttaaggttaatattgttatgtgtgaatttgattttgtttttttggtgttagttggttattttgtatattagttggtgtagtttttttatagtgtcgttggtttttatattttggtgtgtttttgtagtggttggtattggttttttttttttatatttagtgttttttttaggagtttttttaaggtaggtttggtggtgataaaattttttagtatttgtttgtttgtaaaggattttattttttttttttttatgaagtttagtgtggttggatatgaaattttgagttgaaaattattttttttaagaatattgagtattggtttttatttttttttggtttatagggtttttgtagagagagttaatgttagtttagtgggtttttttttataggtaatttgatttttttttttggttgtttttaatatttttttttttattttaattttggagaatttgaagattttgtgttttggggttgtttttttcgaggaatatttttgtggtgttttttatattttttgaatttgaatgttggtttgttttgttaagttggggaagtttttttggataatattttgaagtttgttttttaatttggttttattttttttgttatttttaggtatatcgattaatcgtaggtttggtttttttatatagttttatattttttggaggttttgtttatttttttttattttttttttttaattttgtttttatattttattttattaaattgatttttaatttttgatatttttttttttatttgattaatttggttattgatatttgtgtatattttacgaagtttttgtgttgtgtttttttatttttattaggttatttatgtttttttttaaattagttattttagttagtagtttttgtaattttttattaaggtttttagtttttttgtattgggtttgaatatgtttttttagtttagaggagtttgttattatttattttttgaagtttatttttgttagttcgttaaatttattttttgtttagttttgtgtttttgttggagaggtattgtaattatttgaaggagaagaggtattttggtttttggaattttcggtatttttgtattggtttttttttatttttgtggatttatttattttttatttttgatgttgatgattttggatgtggtttttgtgtgggtatttttttttttgttgatgttgatgttattgtttttttttttttttttttttttttgagataaagtttcgttttgttgtttaatttggagtgtagcggcgtgatttcggtttattgtaatttttattttttaggttcgagtgatttttttattttagttttttaagtagttgggattataagtgcgcgttattatgtttagttattttttgtatttttagtagaaatagggttttattatattggttaggttggttttaaatttttgattttgtgatttgttcgttttagttttttaaagttttgggaataaattattatgtttagttgatgttattgttttttgttttttggttttttttttaatagttaggatttttttttgtaggtttgttggagtttattggaggtttattatatattttatttgttcgggtattattagtggagtttgtagaatagtaaagattgttgtttgtttttttttttggaagttttattttagagggtattagtttgatgttagttagagtttttttgtatgaggtgtttgttaattattgatgggaggtgttttttagttaggaggtatgggggttagggatttatttgaggaggtagtttgttttttagtagagtttaagtattgtgttgggagatttgttgttttttttagagttggtaggtaggaatgtttaagtttgttgaagttgtttttatagtcgtttttttttttaggtgttttgttttaggaagatgggagttttatatataagtttttgattggggttgttttttttttaaagatgttttgtttattgaggaggaatttagagaggtagtttggttatagttgttttgttgtattgtagtgaattttgtaaagttcgaattttttagtggtttttttaatattgtgaggggaaaattatttatataagttttagtaatggcgggcgtttttttttatattaatttggattgttttaggtcgattttagattgttatgttggtagtgagaattttaagttagtggttattagtttgttgggcgttgggggagtgggatttattgagcgagattatttggttttttggttttagttttttttttaggggagtgaatggttttgttttgttggggttttaggtgttattggtttatgaaaaaaaaaattgtagttagttcggtgtttgtttaaatagttatttagttttgtgtttgaaatttagtattttagtggtgtaggtatataagggaattttttggtttgtgggttgtaaaaattatgggaaaagtatagtatttggtttagatagtatagtttttggttcggatagtatagttttttacggttttttttggttagaggagggaggtttttagttttttgtattttttaggtgaattaataatttattttatttttgtttattttttatgagttgtatttattttttaattagttttaatgagatgaattgggtattttagttggaaatgtagaaattattcgttttttgtattggttttattgggagttgtagattagagttgtttttatttagttattttttttaggaatttttagtattttttattttaaatagtaatttttgatttaaattttattttaaataatagttttttggttaatatttttttttgttttgtttttttttattattttattttttagattttaataagttttgtgaatagaaaataattggattttttttttttgttttagagtatagattttttaaggggtaagtttaaattatttgtatttatgatgattattgatttatttagttttgtttatgatattttattaagtgttttttatattgtataattttatagtattattttattgtttttgttattgttgtttgatatttttattttgttatatttatgtattttaaaattagttatgataaaattatttttatagtttgtgttttttagatatatttatatatttattaatattgtttattatttttttttgtattttaatttttgttttgtggtttgatttttttgttttttggttttttagtttttttgtgtgagataggtttttttattttgttatttaagatagggcgtagtagtgtaattttagtttattgtaatttttatttttcgagtttaagcgatttttttattttagtttttcgagtatttgggattatagatatgtgttattatatttagttaatttttttatttttaatagaaatagggttttattatgttggttaggttggtttcgaatttttgattttaagtgatttgtttgttttggttttttaaagtgttgagattattagtgtgagttatcgtatttcgtttgtggttttatttttaaatgaggatttgtgaataataaatttttggatttttgttagaaaaattaatttcgtttttattgtaaaataatagttttgttgaataaggaatttaatgtatttttttagttaattgaagatgttatttattgttttttggtttttgtttttgtttttaagaagtttgtttaatatttagttagtttgtaggttattttgtttttttttgtttggtaatatttagaattttgtttttgttttggtgttatatagttttattattatgtgtttagtttatttttattatttttgttttaggagggtgtattttaaaattttatagtaatgttttttattaattttgaaaaatttttaagtattttttttttgaattttgttttttttttatgttttttatattttttttttggaatttaaatgtattttggatttttttattttagtttttatttttgttaattttgtttttatgtatttttaagtttgtttgtaatgtagtatagataatttttttaagtttattttttaatttattgattttttttttagtgtttaatgttttgattagtttattgagttttagttaattattaatatttattgtttttaaaattacgatttgttttttttaatatttgtttatagttttatttatgtgtatgtgttattattatttaaagtttatagtttaagatttatatttttaggtatttttatagtaatgttttattttttagtattaattttttgtgttagttcgtttttatattgttataaagaaatgtttgaaattgggtaatttataaagaaaagaggtttaattggtttatagttttgtaggttgtatatgttttggggaggttttaggaaatttataattatgatggaatgtgaaggggaattaggtaatattttatatggttggagtaggaggaagagagagaagggggaggtgttgtatatttttaaataattagatttcgtgagaatttagtattataagaatggtaaaggggaattttatttttttgatttaattattttttattaggtttttttttcgatattggggattaaaatttgatataagatttgggtagggatataaatttaaattatattagggtttatgtttataaaattagtaggaagtagttatagaagatggatttttatttttttttagtttttttaagattaaggaggagtatttaatatttgaggggggaatgaggtaggagattggtaggatttattttttagtattgataggataagtgaaaaaaatagtagaaattagtagatggtaataaaagtaatttttagttgtttttattatttattagtataagatattagtattatgacggtttttaaatgttatggtaaggatttagaagttattgtttttttttatgataatgatcgagaagttattattttttttttagaaagttttaaataaattattttttaatttgtattaatttattattgattggtatatgattgaaagtgggtataagtgggtatagagttgttaatagtttatttattgttaatttggtatattatttatgagttagttttgttttgtaaggagtaataaagtttaataaaagattgttgtttaaaattattggtttgtttttgaatttatttttgggtaaagttaagaatttttttgggttaagttttaattttggggtatgtttgttttgtattaaatggataaagaaaatgtgatatatatatatatatatatatatatatatatatatatatatatatatatatatgtatgtatgtatgtatgtagtggaatattatttagtttttaaaaaataaggaaattttgttatttgtgataatatggatgaatttggaggatattatgttaagtgaaatgtaaggtatagaaagataaatattatatgattttatttatatgtggaattttaaaaagttgaacgaagaagtagagagtagaatggtggttattaggtattgggagtagggaaatgggggatagaaaatgggggaattggggagttgtttgttaaaggatataaaatttagttttatagaataaataaggaagttagaatatttattttataatatggagattatagttaaaataatattattgtatttttgaaaaattattgagtagattttaagtgtttttattataaaaaaaggataagtatatgagttgatatatgttaattagtatgatttagtattttgtgatgtatacgtattttaagatattatgttatatatgataattgtatataatttttatttgttagtttaaatatataaattttaaaataaagtatttatattagggatatatttgtattttttaagtaataataataataatttaaaatgtataatataaaattaataaaggttgattatagaataatttataaaaattattttaaaaggaggttaagaggttagatgtagtggtttatgtttataattttggtattttgggaggtagaggcgagtggattttttgagtttaagagtttaaggttagtttaagtaatatagtaaaattttatttttataaaaaatataaaaattagttgagtatgttggtgtgtatttgtagttttagttattcgggaggttgaggtggtaggatgatttgagtttgggaggtggaggttgtaagagagattatattattgtatattagtttgggtaatagagttagatgcggttttaataaataaataggaggttaaaaatataagaaaatatataatataaaataggtgaaaaaatagaaaacgagtaataaaataattttagatttatatatattaattaataattttattaattataaatggattaaatggttatattttatttgtttttatttaagtttttatttatttatttattatttttataggttttagggggataggtggtatttggttatattagtaagttttttagcggtgatttgtgagattttgatgtatttattatttaagtagtatatagtgaatttaatttgtagttttttattttttattttttttttatttttttttattgagtttttaatattatttttatggttttgtatttttatagtttagtttttatttatgagtgagaatatatgatgtttggttttttatttttgagttattttatttagaatagtgtttaattttatttagattgttgtaaatgttattaatttatttttttttatggttgagtagtattttattatatatatatgttatagtttttttgtttattcgttgattgatgggtatttgggttggttttatatttttgtagttgtaatttgtgttgttataaatatgtatgtgtaagtattttttttgtataatgatttattttgttttgggtagatatttattagtggtattgttcgattgaatggtagttttatttttagttttttaaggaatttttaaattgttttttatagtggttgtattagtttatatttttattagtagtgtagaagtgttttttgtttatcgtatttatgttaatttttattattttttgattttttttttaaaaagaatataaaattttattaagaatattttatattgttattagatatagttaaagaaaaacgggtaaataaatagggaaagtttatttttttatgtgttattgttattttagaatagatttttgtgtagatagttggaataatagttggtaataaatgttttgtataaataatttattaagtatataatgttttttttttatatagagaagaattgggtttataattatgaaataagattatatttttaggagttattttttaatagaatataaagtagtttagtagttgtatgttattttagataatgtaattttttaatgaaaaatttagaaaggatattttaatttttttaattagttaatttgtattgttgagttttttttttttaaagattttttagaattagtttagtaattatattttaaaaagatgagttgtttatttatagtgataattgataatttagttttgtgattttgtaaattaagatgtttgggttatttttatttttgttgattttgaaagatttttttagaaaaattttgatttagagaagtaggagtaaggtggtattatattgtggttttgatttgtatttttttgatttttagtgatgttgagtatttttttatatgtttgttggttatttgtatatttttttttgagaattgtttgtttatgtttttagtttaatttttgatgagattgttttttttttttttgttaatttgtttgagtttgttgtagattttggatattagttttttgttagatgtatagattgtgaagatttttttttattttgtgggttgtttgtttattttgttgattattttttttgttatgtaaaagtttttaaattaagttttagttatttatttttgtttttattgtatttgtttttggtttttggttatgaaatttttgtttaagttaatgtttataagggtttttttaatgttattttttagaatttttatagttttaggttttagatttaagtttttagttttttttgagttgatttttgtataaggtgagagatgaggatttagttttatttttttatatgtggtttgttaattattttagtattatttgttgaatagggtgttttttatttattttatgtttttgttttttttgttaaagattagttggttgtaagtatttgggtttatttttgggttttttattttgttttattggtttttgtttttatttttatattagtattattttgttttggtgattatggttttatagtatagtttgaaattaggtaatgtgatgtttttagatttgttttttttttttagttttgttttggttatttgggtttttttttggttttatatgaattttaggatttttttttttagttttgtgaagaatgatgttggtatttatatgggaattgtattgaatttgtagattgtttttggtagtatggttatttttataatattgattttatttatttacgagtatggggtgtgtttttatttgtttgtgttatttatgattgtttttagtagtgttttgtagttttttttgtagaggttttttatttttttggttaggtatatttttaagtttttttgattgtgtgatttgtttgtttgtttgttgtagttattgtaaaaagtggttgagtttttgatttgatttttagtttggttattgttggtgtataggagagttattgatttgtgtatattaattttgtatttaggaaatttgttgaattattttattagttttaggagttttttggaggagttttttgggttttttaggtatataattatattattagtaaatagtgatagtttgattttttttttattaatttggatgtttttatttttttttttgtttgattgttttggttaggatttttagtattatgttgaagtggtgaaagtgggtatttttgttttgttttaatttttagagggaatgtttttaatttttttttatttagtattatgttggttgtgcgtttattatatatggtttttattatattgaggtatgttttttgtaggttgattttgttgagagttttaattataaaaggatgttgtattttgttaaatgttttttttgtgtttattgagatgattatgtgatttttgtttttaattgtttatgtggtgtattatatttattgacgtgtatatgttagattatttttgtatttttgttatgaaatttatttgattatggtggattatttttttgatatgttgttggatttggttagttggtattttgttaaggatttttgtatttatgtttattagggatattggtttttagtttttttttttgttgttgttatgtttttttgtttttttttggttttggtattaggatgatattggttttataaaatgatttagggaggattttttttttttttattttgtggaatagtgttaataggattggtattaatttttttttgaatgtttggtagaatttagttgtgaattcgtttggttttggatttttttttttgtaatttttttattattattttaattttgttgtttgttattggtttgtttagggtatttaattttttttgatttaaggtaggagggttttttttttttaggaatgtatcgattttttttaggttttttagtttatgtatataaaggtgtttatagtagttttaaatgattttttgtatttttgtggtgttagttgtattattttttattttatttttatttgagtttttttggattttttttttttttggttaattttgttaatggtttattaagtttatttatttttttaaagaattagttttttgttttatttttgtatttttttgttttaattttatttagttttgttttgatttgggttatttttttttttttgttggttttgggtttggtttttgtttttttagttttttgaggtgtgattttaggttgtttatttgtgtttttttagattttttgatgtaggtatatagggttaagaattttttttttagtatcgtttttgttgtattttagaggtttttgtaggttatgttattattgttatttagtttgaataattttttaatttttattttgattttattgttgatttaatgattatttaggagtaggttatttaatttttatgtatttgcgtggttttaaaggttttttttggagttgatttttagttttattttattgtggtttgagatagtgtttaatataattttagtttttttaaatttattgagatttgttttgtgttttattatgtggtttattttggagaaagttttatgtgttgaagaattgaacgtatattttgtagttgttgggtaaaatgttttgtatatatttgttaagtttatttgttttagggtatagtttaaatttattgtttttttgttggttttttgttttaatgatttgtttagtgttgttagtggcgtattaaagttttttattagtattgtgttgttgtatatattattttttaggtttagtagtaattgttttataaatttgggagcgttagtgttaggtgtatatatatttaggattgtgatatttttttgttggataagaaatgttatattttaaaaataaaaattattaaattggattaaatggtaatataaatgttagttgataggatagttaatattatatttaataatgtaatgaagagtaagaaagggttgggttttgtggtttatgtttgtagttttagtattttgggaggtttaagggaagaggggttggtttttatttttcgtatcgcggggggcgtttgagataaggtggattatttgagataaggagtttagattagtttggttaatatggtaaaatttcgttttaattaaaaatataaaaaaattagttgggtgtggtggcgggtatttgtaattttagttatttcgggaggttgaggtagaagaatcgtttgaatttaggagatagaggttgtagtgagtcgaagttacgttattgtattttagtttgggcgataagagcgaaattttgttttaaaaaaaaaaagtaagaaagaatttaaatttatacgtagtgattatgataataaggaattttgtttgtgtgagttttgaaaattttataaagtttttaaatatggagtttatgtttagtgattgagttatttaatgttaaatgatatttaagtatttatttttaatattttattaattaagtatataatatgtatttaaggaattatgataaagtaaattaattttttatttatattattatatttatttgatttattaaaatttgttttttttaaattttatgttttgtaatgtgtttagaaataaatagtaaggtatggcgttacgtatttgtaattttagttatttaggaggtagggtaggaggattatttgagtttgggagtttgaagttagtttaggtaatatagtaagattttgttttaaaaattaattaattaattaattaattaataataataagtggtagttttgtttttggttaaaatattgattttgggttgggcgcggtggtttacgtttgtaattttagtattttgggaggtcgagatgggcgattataaggttaagagattgagattattttggttaatacggtgaaattttgtgtttattaaatatataaaaaaattagtcgggcgtggtggtaggggtttttggttttagttatttaggaggttgaggtaggagaatggcgtgaattcgggaggttgagtttgtagtgagttgagatcgtattattgtattttagtttggatgatagagcgagattttgttttaaaaaaaaaaaatttttggtagggtatagtgttttacgtttgtgattttagtattttgggaggttaaggtgggtagattataagattaggagttcgagattagtttggttaatatggtgaaattttatttttattaaaatataaaaattagacgggtgtggtggtgtacgtttgtaattttagttatttgggaggttgaggtagaagaattgtttgaatttaggaggtagaggttgtagtgagttaagattacgttattgtattttagtttgggtaagagagtaagattttattttaggggaaaaaaaaaaaaaaagattgattttggtttattatttgatcgagttttttttattagtatattatttatttatttattagttattggatataaaagtttttggaattgagttttttataattgttttttataattgtttggatgtagtttattttaaataataattatttatttaagtttattaagtttattttttaaaaaaaagaaaatatttttgaatagtaaaatgattaacgaaaaataataaaattatttgagattagtcgtagatttttattagttaaaaatagaaggaatttttaaattaataaagagtagattaaataaaggtaaaaataaaatgagagaatagaaaatgagatgaaaaaagaagaaaaattatagtagttaagtttaatgaggtgttttgttaattattgaaatgtgtttgtttagtttaagaaaagttgaaaagaaaaaaatgggtcgggtggggtggtttacgtttggaattttagtattttgggaggttaaggtaggcggattacgaggttaggagatcgagattattttgattaatatagtgaaattttatttttattaaaaatataaaaaaaaaaaaaaaaattagttaggtatggtggtaagtatttgtagttttagttatatgataggttgaggtaggagaatggcgtgagtttgggaggtggagtttgtagtgagtcgagattatattattgtattttagtttgggtgatagagtaagattttgttttaaaaaaaaaaaagaaaaaaagaaattagatgtatattagtgaattttatattttttagatttatttaatggtggattgaatgattgtggaaagaaatattttttttattatatgaagtattttgtggtttagtggtaattttgatgaaattatattgttttgtaatttatggatatttttatatattaaataagaaaaattatattaaaattaattattatttaattatttttgattaggtgttaaaaggatttatattttattttttatttattcgataagtttttatttatttgcgatttaggttaaatgttattttatttgtaaagtttttttaaatatttattaagggagattgtttttaatatagtttttaaattatttttatatattttaattattttttgtttatacgtttattcgttttattagattttgtgtatttggaggtgagaaattagatgtttttcgtttttgtttttttagagttaagtttagttggtttatgaaaattatttaaaaattattgaaagaattttagttttaagaggaaaaaagtaaataattattatatatagtaataaatagtttaggaataaaatattataggaggaatgataattttattttaatagagtgttgggatattttataaaaagatgatatttgatttgttttgaagaagttataagttagatgaagtaaataaaagtggattttaaaaggtgaaattaagtttattttaaggagtgaatatgagttaatgtttagaggtaggatagtatgaagggtttaacgagagtgagtggataggttttgttggattataagtgaaaagtagtattagaaatgatattagaaaagtagattggggtttaattgagaagttttttgaatgttatagtaaataaagttttaattatttattttatagataatgtggagtttttggttttaaagaagagtattaaaattaaatttttttttttaaaattttattttttttagattaacgaatattatttaagttatatttttagttttattaaaggttatgttttaattttttttttttataggaaagtaattttaaaaaaaaaaaaaaaagggaaaagaaaaattttagataaaattggttttggtaggattatttttaggtaggatagtataagatataagaattaaatgattggtaatagaagatttattaagattaaaattgtattggttattagataagtgattagatttgatttgtttaaattagagtttgtaatttattttgaatataaagtaaggtatggttatttaaaaatatataatattaaaaaatgtaaaaaaaaaaaagagggaagtgaaaattattataattatttttattttttaaaatgattttgttattaatatttaagttaaattattaattttttttaatgtttgagtatatatatagatagatattttatttttttaagtagattttaaatttatatatttgtatttttttatttaatatattatgaaaatttttttataataatatgtatttatataatatttaattagtgtataatttatttaaatatttttttgtaggtggattttatttttttatttaaattaatattatagtaaatgtatgtttttttatatatttatttaaattttttttgaagttaaatttttaaaaaagtaatttttgaattaaaaggtatttggtgtagtagttgtagagatagggtgtagaatttttgttttgtaattataaggtagttttttttttattttaattaaagtatgtggggttggtaagattatagaaaaaagagaaaggaatattttgaatttgtgtatgaaatttttgtgagtagtatatgtaagaaattaattagaggttgggcgtggtggtatatatttgtagttttagttatttcggaggttgaggtatgagaattatttgaatttagaaggtggaggttgtagtgagtcgatatagcgttattgtattttaatttgggtgatatatttttgtatttagttttaaaataaataaataaataaataaataggtcgggcgtggtggtttatgtttgtaattttagtattttgggaggttaaggtaggtggattacgaggttaggagattaagattattttggttaatatggtgaaattttatttttattaaaaatataaaaattagttaggtgtggtggtgcgtatttgtagttttagttattcgggaggttgaggaagtaaaattatttgaatttaggaggtagaggttgtagtgagttaagatcgtgttattgtattttagtttgggtaatagagtaagattttgttttaaaaataaataaataattttaaaaaaattttaaaaattgattagaaatgatatttataaaatttgagaatttaatagtgatgtgaaatattattaggttttagattgatttttaagtagtatataagtaggataagttagaatagtattataaagattttgaatattaaattaatatttgtattatggtttataaatatgggttaagatatgtgttttgaatttaaataagttgattgtttattaaaatagaaatattaaatagaaattaggttttaatgtattatatttaaaatgtttaatatataaataaaaaattatttgttattattaagaattataaaaatttaaataagaaaatttaaatagtgttaatattaagatgatataggtattgtaattattttataagtattttgtagtagttattataaaaaatgttttaataagtaattatgaataatttcgaaattatttttaatggaatattttagtaataaatataaaatataagaaagaagtatttaagtttttaatttattttgaattaatttttgtataaggtgtaaggaagggatttatttttagttttttatatatggttagttattttttttagtattatttattaaatagggaattttttttttattttttgtttttgttaggtttgttaaagattagatagttgtagatatgtggtattatttttgagggtttatatttttgttttggtattagtattatgttgttttggttattgtagttttgtagtatagtttgaagttaggtagcgtgatgtttttagttttgtttttttggtttaggattgatttggtaatgtgggtttttttttggttttatatgaattttaaagtagttttttttaattttgtgaagaaagttattggtagtttgatggggatggtattgaatttataaattattttgggtagtatggttatttttacgatattgattttttttatttatgagtatggaatgtttttttatttgtttgtatttttttaaatgttagatttaaaattataaaaattttagaagaaaatttaggtaatattatttaggatataggtatgggtaaggattttatgtttaaaatattaaaagtaatggtaataaatgttaaaattgataaatgggatttaattaaattaaagagtttttgtatagtaaaagaaattattattagagtgaataggtaatttatagaatgggagaaaatttttgtatttatttatttgataaagggttaatatttagaatttataatgaatttaaataaatttataagaaaaaaataaataattttattaataagtgggcgaaggatatgaatagatattttttaaaagaagatatttatatagttaaaagatatatgaaaaaatgtttattattattggttatcggagaaatgtaaattaaaattataatgagattttattttatattagttagaatggtaattattaaaaagttaggaaataataggtgttggagaggatgtggagaaataggaatatttttatattgttggtgggattgtaaattagtttaattattgtggaagttagtgtggcgattttttagggatttagaattagaaatattatttgatttagttattttattattggatatatatttaaaggattataaaacgtgttgttataaagatatatgtatacgtatgtttattgtggtattatttataatagtaaagatttggaattaatttaaatgtttaataatgatagattggattaagaaaatgtggtatatatatattatggaatattatgtagttataaaaaatgatgagtttatgttttttgtagggatatggatgaagttggaaattattatttttagtaaattatcgtaaggataaaaaattaaatattatatgtttttatttatagatgggaattgaataatgagaatatatggatataggaaagggaatattatatattagggtttgttgtggggttggcggaggggggagggatagtattaggagatatatttaatgttaaatgacgagttaatgggtgtagtatattaatatggtatatgtatagatatgtaattaatttgtatattgtgtatatatattttagaatttaaagtataattaaaaaaaaaaagaatgttgatatagtttttaaataaggtagatttaaagataagaagtattgatagagttatagatgaatattatttatggtatatgtttatttatgtaataaatttgtatattttgtatatgtatttcggaatttaaaataaaaagatgaatatttttaaaaaaaaaaagaaagaaagaagtaaatggaaattttatagttggaaaataaaataattaaaatgaaaatttattggatggatttaataatagaatgaatatgataaaagaaataattagtgaatttaaagatagagtaattgaaattttttagtttgaattgagaggaaaatatattgaaagaaaaaattaaaaatgaataggtaagatttaagatggtcgaataggaatagtattagtttgtagtttttagcgagatcgaggtagaaggtgggtgatttttgtatttttaattgaggtatacggtttattttattgggattggttggatagtgggtgtagtttacggagggtaagtcgaagtagggtggggtattattttatttgggaagtgtaaggggtcggggaatttttttttttatttaagggaagttatgagggtttgagtttgaggaattttagtatagatattgtatttgttttatagttttcgaaatttataaattaggagattttttttagtgattattttattagggttttgggttttaagtataaaattgggtggttaattgggtagatattgaattagttgtaggagtttttttttttttttttatattttagtggcgtttggaatattagcgagatagaatcgtttatttttttggaaagaggggttgaagttagggagttaagtggtttggtttggttggttttacgtttatggagtttaggaaattaagatttattggtttgaaatttttgttgttagtatagtagtaatttgagatttatttgggatgattgagtttggtggtggaagagacgtttattattgttgaggtttgagtagatggttttatggttatagtataaataaagttgttgggaagtttaaattgggtagagtttattgtagtttagtaaggttgttgtggttagattgttagattgtttttttttggatagggtatttttgtaaaaaaggtagtaattttagtcgggggtttatagtagatttaaacgtttttgtttgatggttttgaagagagtagtggattttttagtatggtattgaagttttgttaagggttagtttgtttttttaagtgggtttttgatttttatgtatattgattgggagatattttttagtttggatcgatagatatttgatataggagagttttggttggtatttgataggtgttttattgggtcgaagtttttagaagaaagaataggtagtaatttttgttgttttgtagtttttgttggtgatatttaggtaaatagggttaggagtggatttttagtaaattttagtagattggtattaaaggggtttgttagaaggaaaagaaatagaaaggattagtacgtttatttaaagattttattcgaaggttattaatattaaagattaaaggtagataaatttataaagatgggaaaaaagtagtatgaaaaggttgaaaattttaaaaattagaatgtttttttttttttaaatgattataatttttcgttagtaagggaataaaattggatagagaatgagtttgatgaattgatagaagtaggttttagaaggtgggtaataataaaaaattataagtttaagaagtatgttttaagttaatgtaaagaagttaaaaattttaaaaaaaggttaatcgaattaattagaataattaatgtagagaagaatataaatgatttaatggagttgaaaaataaagtataaaaattttatgaagaatatataagtattaatagttaaattgatgaagtagtgattgaagattaatttaatgattaatttaatgaaataaagagagaagataagattagataaaaaagaataaaaaggaacgaataaagtttttaagaaatatgggatttgtcggggcgcggtgggttatatttgtaattttagtattttgggaggttgaggtgggtggattacgaggttaggagatcgagattattttggttaatatggtgaaatttcgtttttattaaaaatataaaaaattagttgggcgtgggggtgggcgtttgtagttttagttatttgggaggttgaggtaggagaatggtatgaatttagaaggtggagtttgtagtgagtcgagattatattattgtattttaatttcggtgatagagcgagattttattttaaaaaaaaaaaaagaaatatgggattatgtgaaaagattaaatttacgtttgattggtgtattttaaagtgacggggagaatggaattaagttggaaaatattttttaggatattatttaggagaatttttttaatttagtaatataggttaatatttaaatttaggaaatatagagaatattataaagataatttttaagacgagtaattttaagatatataattatcggatttattaaggttgaaatgaaagagaaaatgttaagggtagttagagagaaaggtcgggttatttataaagggaagtttattagattattagtcgaattttttgtagaaattttataagatagaagagagtgggggttaatatttaacgttttgaaagaaaagaatttttaatttagaattttatatttagttatattaagttttataagggaaggagaaataaaattttttatagataagtaaatgttgagggattttgttattattagatttgttttacgagagttttagagggaagtattaaatatggaaaggaataattggtattagttattgtaaaaatatattaaattgtaaagaatattgatataatgaagaaattgtattaattaatgggcgaaataattagttagtattataatgataggattaaatttatatataataatattaattttaatgtaaatgggttaaatgttttaattaaaagatatagattggtaaattggataaagagttaagatttattagtatgttgtatttagaagatttattttatgtgtaaagataaatataggtttaaaataaagggatgggggaatatttattaagtaaatggaaagtaaaaaaaaagtaggagttgtaattttaatttttgataaaatagattttaaattaataaaaattaaaagagataaagaagggtattatataatggtaaagggaataatgtagtaagaagagttaattattttaaatatatatgtatttaatataggagtatttagatttataaagtaagtttttagagatttagatttttaaataataatagtgggagattttaatattttattgttaatattagatagattaatgagatagaaaataaagatatttaggatttgaatttagttttggattaagtagatttaatagatatttatagaattttttattttaaattaatagattatatattttttttagtattttattgtatttattttaaaattgattatataattagaagtaaaatattttttagtaaatgcgaaataatggaaattataataaatagttttttagattatagtgtaattaaattagaatttaggattaagaaatttatttaaaattgtataaataaatggaaattgaataatttgtttttgaatgattattgggtaaataatgaaatgaaggtagaattaaaaatgttttttgaaattaatgaaaatgaagatataatgtattagaatttttgggatatatttaaagcggtgtttagagggaaatttatagtattaaatgtttataagagaaattaggaaagttttaaaattgatgttttaatatcgaaattaaaagaattagagaagtaatagtaaataaatttaaaagttagtagaagatatgaaataattaagattagagtagaattgaaggagatagagatataaaaaattttttaaaaatattaatgaatttaggagttgattttttgaaaaaattaataaaatagattattagttagattaataaagaagaaaagagagaagaattaaatagatgtaataaaaaatgatataggggatattattattgattttatataaatataaattattattagagaatattataaatatttttatgtaaataaattagaaaatttagaagaaatggataaatttttggatatatatatttttttaagtttaagttaggaagaagtcgaatttttgaataaagtaataataatttttgaaattgaggtagtaattaatagtttattattttaaaaaaaattttaggagtagatggatttataggcgaattttattagaggtataaagaggaattggtattatattttttgaaattattttaaataatagaaaaatagggatttttttttaatttattttatgaggttagtattattttgatattaaaatttggtagagatataataaaaaaggaaaattttaggttaatatttttgatgaatattaatgtgaaaatttttaataaaatattggtaaatcgaatgtagtagtatataaaaaagtttatttattacgattaagttggttttatttttgggatgcgaggttggtttaatatacgtaaattaataaatgtaatttattatataaatagaattaataataaaaattatatgattattttaatagatacggaaaaggtttttgataaaatttaatatttttttatgttaaaaatttttaataaattaggtatcgacggaatatattttaaaataataagagttatttatgataaatttatagttaatattatattgaatgggtaaaaattggaagtattttttttgaaaatcggtataagataaagatgtttttttttattatttttatttaatatagtattggaagttttggttagggtaattaggtaagagaaagtaataaagagtatttaaataggaagagaggaaattaaattttttttgtttgtagaagatatgattgtatatttagaaaattttatcgttttagtttaaaatttttttaagttgataagtaattttagtaaagttttaggatataaaattaatgtgtaaaaattataagtatttttgtatattaataatagatagagagttaaattatgagtgaatttttatttataattgttattaagagaataaaatatttaggaatataatttataagggatgtgaaggatttttttaagtagaattataaattattgtttaaggaaataagagaggatataaataaatggaaaaatattttatgtttatggataggaagaattaatattatgaaaatggttatatagtttaaagtaatttataaatttaatgttatttttatgaagttattattgattttttttatagaattggaaaaaaattattttaaattttatatggaattaaaaaagagtttgcgtagttaagataattttgggtaagaagaataaagttagaggtattatgttatttgattttaaattatattataagattatagtatttaaaatagtatagtattggtattaaaatagatatatagattaatggaatagaacggaggcgttagaaataatattatatagttataattatttgatttttgataaatttgatatatataagtaatggggaaaagatttttaatttagtaaatggtgttgggaaaattggttagttatatgtagaaaattgaaattgggttttttttttatattttttataaaaattaatttaaaatggattaaaaattttaatataagatttaggattataaaatttttagaagaaaatttgggtaatattatttaggatagaggtatgggtaaagattttatgtttaaaatattaaaagtaatggtaataaaagttaaaattgataaacgggatttaattaaattaaagagtttttgtatagtaaaagaaagtattattagagtgaataggtaatttatagaatgggagaaaatttttgtagtttatttatgtgataaagggttaatatttagaatttataaagaatttaaatttataagaaaaaatttattaaaaagtgggtaaaggatatgaatagatattttttaaaagaagatatttatgtagttaatagatatatgaaaaaaatgtttattattattggttattagagaaatgtaaattaaaattataatgagattttattttatattagttagaatggcgattattaaaaagttaggaaataataggtgttggagaggttgtggaaaaataggaatgtttttatattgttggtgggagtgtaaattagtttaattattgtggaagatagtgtggcgattttttaaggatttagaattggaaatattatttgatttagtaattttaatattgggtatatatttaaatgattataaattattttatagtaaagatatatgtatatatgtttattgtggtattatttatagtagtaaagatttggaattaatttaaatgtttattaatgatagattggatttagaaaatgtggtacgtatatattatggaatattatgtagttataaaaaaggatgagtttgtgttttttgtaggaatatggataaagttggaaattattatttttagtaaattattataagattagaaaattaaatatcgtatgtttttgtttataagtgggagttgaataatgagaatatacggatatagggaggggaatattatatatcggggtttgttagagagtggggagttaggggagggataatattaggagaaatatttaatataggtgataggttgatgggtgtaataaattattagggtatatgtatatttatgtaagaaaaatgtatattttgtatatgtaatttagaatttaaagtataataaaaaaaaaaaaagaaagaaaagaaaaaacgaatagagtaataagtatttgtgggataataataaagtttttaatatttttgtgattggaattatagaaggagacggtatagggtgttaaaaaaaaaaaaaaattgagataggtttttattttgttatataggttggagtgcggtggtatgattatagtttattgtagttttaaatttttaggtttaggtgatttttttgttttagtttttcgagtagttgggattattgatatatgttattatgattagttaattttttttattttttttgtagagatagtgttttgttatgttgtttaggttggtttgaaaaaattttttaataaaataatgattgaagattttttaaatttaatgaaagatataaatgtgtaatttaaaaagttaaagtaatttttaatataataaatttaaagaaatttatgtttagatatattataattaaatttttgaaaatttaaaaaaattttgaaaatattttgaaagaaaaagtattatttataggagaataataattagaattatagtggattttttattaaaaaatttaaaataggaagaaagtagtataatattttttaattgttaaaaaataagatttattagtttagaagtttatatttagagataatatttcgaggaaattttaaatatatttttagtaatgttatagaatagtaattaattgtatttttttatgttagtaataaaaagtaggaagttaaaattgaagtatagtattatttataattattttaaagaaaattaaatatttaagtataaatttaataaaatatgtatagaattagtaggttgaaaattataaaatgttgatgaaaaaataaaaatagatttaaataaacggagagatatgtagtgttatttaattggaagataataaagatgttaattttttttaaatcggtttataggtttaatatattttttattaaaagtttttttttgtagatatagataaattggttttaaaatttatatgtaaagttaaaagaataaaaattgttaaaataatatttaaaaagaatagtaaagtaggaagaattatattatttaatgttaatatttattattgtagattgttaggttaagatggttgattagaaatagttatggtttatagtatttatagagaggaataaaagaggtaagtgaatatagtatttttaattgaaatatttaggtatttgtattgggatttattaggaaaataattcgatttatagagaataaagaaaagttggatggggcgatagtttttttgggagcgatatagagttaaaggaatttttatttttagttaagggaagaagtgagtgatggtgcgattttaggaaattatgttttttttatggatttttgcgattggtggattaggagatttttttatgagtttatgttattaaggttttgggttcgatatatatatagttgtgtggagttttggtagagtagttgtttagatatatatagagatttacgagttttatatattttggtttagggcggagcgtaggaagggttttaaaatagattatattataattgttgttttgggagaaagtaaaagttaaaaaagtattgtatttagtttaggttttagttaaattgcgagatattacgttatttaagaggtaggcggaggaaggaaatttatcgttttggaagaggcggaggaaatcgtttttttttttgtgatttagttttggaggaattttttttttgaaattttgcggtgttgagtaggatcgttaggtcggtaagtaggaggcggttttttcgtaatcgttaggcggcgatatttagggcggcgcggttaggaggcgggatttttttttttttcgttgttttttttcgcgtttttttttttttcgcggttttttttcgcgttttttttttttttatattttttttttataagttttttttttttttggtttttttttaagcgttttttttttttaaattttttttagttttttttttttttttttatttttttttttatttttttattttttttagtttcgttttttttagtacgatggtatttttttcgttttaaattttttttttattttttttaatttattgatcgttttcgtttttttatttttatttttttttttcgtacgtattgtttatttttttgttttttcgtattttcggattttttaagtatatatatttagttttattttatttaattcggtttatttattttttgaattattttattttattatttttttttttttttattttttttttttttagtagtttttttttttttttttttttatttttttatttcgttatatttttttttttttttttgttttcggtttttttattttatttttttttttttattgtgttgtttcgcggtaggaagagaagagtggtgatatttgaggaataaaaggtataattttttttttaaatattgttaaaatgattttgaaaataaataattaggtagataaggggaatagggaatagtaatagattgtaatgtttttttggaaaattggtgaaaagcggagttgatgaaagtggaatttattgtgtatttaaagaaatgttatatagaaggaaaattattgtttagatagagttttaaatttttagaaatggaaagttaaaaattaagaaagtttagggtaagagggtaaatttgaaaaagatggatttattgaaaatttgtataagaaggagttagggttgagattttttttttatttttggtttgtatatttatgaatttaatttttttttaatattatttttgatttaaaataagaattagtaaattttttttataaagggttaaatgtttattttggttttgtaggtttttatgggttttattataattatttatttttgtttttatagtataaaagtagttatagataatatataaatgaatgaagaatatggttatgttttaataaagttttatttatggagatttaaatttgaattttatataatttttatatgttataaaatattatgtgatattttatatgaaatgtaaaaattatttttagtttatgggttatataaaaaaaaaataagttgtagattggatttggtttattgggtggtagtttgtttatttttggtttaaagaaaaaaataattaataaattaggaataaggttaggtgtagtggtttatatttgtaattttagtattttgggaggttgaggtgggttgattatcggaggttaggagtttaagattagtttggttaatatggtgaaatttttatttttattaaaaatataaaattagttgggtatggtgatgtttgttcgtaattttagttatttgggaggttgaggtaggagaattttttgaatttagtaggtagacgttgtagtgagtcgagattatgttattgtattttagtttaggtaataagagtaaaattttattttaaataaataaataatataaataaataaataaattaggaatagaagagaatttttttaatttgataaagggtatttatttttttttattttgaaatatattttttaaaaagagaaagttgggatgtatttttattaaaattatgaagataaggagattattattattatttttatttaatattgtattttggttattattagtataatgagataagaaaaagaaattaaaagattggaaaggaagatataaaattgttaatatttatagaggatatgattatattatagaatttaaagataaattaatttaaagataaattattataaataataggaaagtttaatgaagtaattgatataaatttaattttttatttttatatttttgttttttttattgtttatgtttttatgtttttgttatatttgttgggatatttttttttttttatttttttaaatttttattaaatatttattttgagtttttatattttaagtttttaggagttgtttatttgttaattttttttttgtttaagtattttgtttttttatagatgtgatatttgtttttattttttattgattatagttgtgttttaaagttttttttgaattgtttttgtttttttaagtttttttttgttttgaattttgtttttgttattggatattttttttgtattttaatgagattaagaggttttttttgaaattttatatattagtattttattttttaattaaaatttaatatttttgtagttttagtgttttagagtttttattgttttttttttttgattttattagtatttttaggtattttttttttttgtttttagttagttagttttttttttttatcgattatattatttgaaattttttagtttaaattatgattagttaatttagttgtatttataatttaaatatttttttattagattaaattaattttgtttttttagttgttagaagattaaaaagtttgtatgttggatttttaattttttagttttatgtttttttgagtttttaatatgtttatttaagtatgtttttttattgattaaggtagtttttgtagatttttaggtatatttttaaattattttttagtttttatttttagtagaggattatattttatatttttattttatattttagtggaagtggtatttttgtttttatatagattttttatataaattttttttttttatttgtgttttagttaagtgatttttaaatttaagtatgtattaaaattatttggtatatttttaaagttttatttttatagatattaatttattgtatttgggataaagtttaataattttgtattataatttaggtattaaatttagtaaataaagtttttattttttttgatgttgttggttttaattttttttttagttttagaagatattacgtgttttatggtttgtcgtaattagggttattttttttattttttgaaaagatattattattttgaatattttttatatatatatatatatagagaaaattaaattatttataattttattaattgttttagagatttatttttatattttttttttatattttagtggaagtagtatttttgtttttatataaagtttttttttttatttgtgttttagttaagtgatttttaaatttgagtatgtatttaaattatttggtgattgttaaagttttatatttatagattttaatttattgtatttgtgatgaagtttaataattttgtattgttaataagtttttaggtgatgttagtgttatttatttgcggattattttttgagtattttgttttagattttattattttttgttttttagaagtttatattttatttttaattttttttttattttttatgtttatattttattttttaaatatatatgaatgtagttaagattttttaatttttaaaaaagaaaaaaaaaatttttaaaatattttattatttttatttttttttttttttttttttttttttggagatagagttttgttttgttatttaggttggagtgtaatggtgcgatttaagtttatcgtaattttcgttttttagaattaagtaatttttttgttttagtttattgagtagttagaattataggtacgtgttattatgtttagttaattttttgtatttttagtagagacggggatttattatgttggttaggttggtttgaaatttttgttttcgttgatttatttattttagttttttaaaatgttgggattatagacgtgagttattatattcggtttgtattttttttttataattaagttttttagaggaattatgtttatattttttattttttcgttatcgattgtattttttaatttggtttttattttaattaaagtattaaaacgatttagatattaaatttagtaaataaggtgtttattttttttgatgttggttggttttaattttttttttagttttagaagatattatatgttttatggtttgttaaaattagggttatttttttattttttgaaaagatttattattttaatttttttaattatagtatagatgatataggattaataagatatattttttttttttttattttttattaaatgtaatgtaaagtaaatttaaatattaattatattgtttttttttttttttggaggtaggaagttttttatgatttaaattattttgtgttttgaagtattttgttttttatgtagtggtttttattgtttttgggaagttttttttttttaagtgatgatgtttttaaggttttgatttttttttatttttattttttatttgggttatattttttattttatggtttaggtttaataatataattgtatttttgatgtagttttgtaaaatttttgattaatttagattaaatgtatatattttgaagatgttatttgattttattaataatttttaaaattatttttatttattaaagattattgaagttatatgaattaaaaggttttaaaatttttatttttcggtttggtatagtggtttatatttataattttagtattttggaaggtcgaggtgggtagattacgaggttaagagattaagattattttggttaataaggtgaaattttggttttattaaaaatataaaaattagttgggtatggtggcgtgtatttgtagttttagttatttaggaggttgagataggagaattgtttgaattcgggaagtggaggttgtagtgagtcgagattgcgttattgtattttagtttgataatagagcgagattttgtattaaaatatatatatgtatatatatatatatatatatatatatgtatatatatatatatatatatgtatatatatatatatatatatatttttttgataaaatatttaagtgtttatttttttaaaagttattaattatagtttttttatatattttggtagtgaaaatattataaatatatgatatgtataaatatatagatatataaatatatagaagtagattttatagatttgtaagattttttatgtgttagtttttaaagttttttttttttattttggatttttttttgattatttgttttttgttttaaataattgttagttatgttattttaaatttgtatttttaaaggtataatttttaagtgaaatgaaatagaaaatttatattttatttaaattaaggaaaaatggtatgagtaaaagtttagttaagatggttaggaagttgtgtgtggtggtttatgtttgtaattttagtatttagagaggttaaggtaggaggattatttgagtttaagagtttaagattagtttggataatatggtaagattttatttttataaaaatatataaaaattagttgggcgtagtggttttagttgttggggaggttgagttgggaggattatttgagtttaggaggttaaggttgtagtaagttatgtttttattattgtattttagtttgggtgatagagtaagattttgttttaaaagaagaaaaagaaaaaagatggttaggaaaatagatatatttgtttattgaaatttttttaaagatgttagttttttaattgaattattggttttagggtggagttttttaaggaatagggttaggaaagtatgtagtttttatggtttaataagtaggtatagttggaaggtaaaatagatttttaaagttaaggatttaatttttatattgaattttgggtttttaagagaggagaatatcgtaggataagatagtgtaatgtttttacggtgtattttattgtaaggatatttttttgaggttggtgggtaattttatagtaattagtttattttgtaattatttaatgttttatgggagttttaatttttattttatattttttaggtgttcgaaagtatgttttttttatttaaatgtgtaaaaaaaaagtagtattattttgtagtaataattatttattgtaaataacgttaatagttatttttaaaagtatattttttttttagtttttatatattaagattaaaatttaagtagatagaatttagttgtttaagatgtttttatagagagagagtagaggttttaaaataatatttgtatatatatattttaaattagttttaattaagttgatttttaattatagagtttttgaagaaaatttttttagattttttattattagtttttagttggaataaatagttgatatttttggtttttgaattttttattaaggataattttttatttgaaattaatgagttttaattagggttatgatttaattatagatgtataaggtatttttaaagagatgttaagtagttttttataagatttagaattattttaaaggtattttagagtaaggaaaatttaagataggaaattagaagttgtttattaatgaatggtaaaaagttttataaatataaaattagaaaggacgtattttttaagttgggaagtgattttaggttattatagtgaaagggtagagatttagttattgtgttatagtatagggtggttgttagtgttttttttagaaagaatttagagtagttatttttaagtttgcgaatgattttaattgtttaagagaatttttaaggttatttacgatattattgtttaatttttttttaattgttttagataagagatttttaaaatttttttttttttaatggtgtatttagttttaatagagatttaaatattttttttaaattgtagatggtaattttttaggtttttgttatataagtagtaagaagtatttttagaggaggtatttttaagtatttttttttggaaatgggtttaagatagtaaaatataataaaagttttgtagagataggattgtttttttgttttaataaatttaattagtagagatgggacgttttaagataaaatttatttaagggttcgatatatttaggacgaagagtatgttaatgtgttttagatttttagtttttttagattagttatttgatttgaatttaagaatttttattttttagatggtagagattaagagagagagtatttttatatggttataaagttaagtttttaattatataaaataagattagggaaattttatttagtttttgttttaaggatttgtagtaaagtttgtaatcgattagtttgtagggttggtttgaatagtaggtttatagggattttaggtttgtgttttattttatggtatttttttttatgatagaacgatataaaaaggtaaagataaaggaagatggtaaaaaaggtgatttttgagaaggggttaaataatataaatatttatagtttaaagtagtaaaagtatataagatttattataatttaagattagttatataaatttttttttttattaattaaaattttgtagaggagataaatagtgatttttattgtttatttaatttatttgtatagagagagaaaggttagaggttagttggtaagaaattagttttttattagtttgttaggtttatggttttttttttttagttgtttttagaagagtagagtggtttttgatgattttgtttgttgtatcgtagttgtgggggttaagttacgttataaaagaaaaatattttttttttttttatggaattataggtaaaaggttttagttttgtaagaggtagtttaataggttgtgtgggggaattaaattaatattttttattttaataggagttatatatatatgttaaaatatagatattagttattttgtttagtgtttaagtattaatttggtaaggtttaaatttgtttttattggtttttatttgagttttttttttaatataagttttatggtggtagggtatattaagaaagtttggtaggttaggcgcggtggtttttgtttgtaattttagtattttgggaggttaaggtaggtagattatttgaggttaggagttcgagattagtttggttaatatggtgaaattttgtttttattaaaaatataaaattagttaggtgtggtggtgtgtatttgtaattttagttatttaggaggttgaggtaggaaaatcgtttgaatttgggaggtagaggttttagtgagtcgagattacgttattgtattttagtttgagtgatagagtgagattttattttaaaaaaaagtattagaattagaatgaagttgttttttttgttatgttttgtagtattttttttagtgtaatttattgttaaagtttaacgttgtgtttaatggtaaagaagaaatgtttatagggtttagttttagaattataaggtaggataaagatggagtggatttggaataaagatgtaataaaataatattgagtattagttatatttttggttgtatagtttttatattatatatatttgaatttttttttttttttgagatagagttttgttttgttatttaggttagagtttagtggtataattttagtttattgtaatttttgttttttgggtttaagcgatttttttgttttagttttttaagtagttgggattataggtatttattattatatttagttaatttttgtatttttagtagaaatggggttttgttatgttggttaggttggtttggaattttcgattttaggtgatttgtttgttttggttttttaaggtgttgggattataggtatgagttatcgtgttcggtttgaatttttatataataatgaaataattttttatttttattaattaagataaagttattttataagtgaagaagtttttattttgtttttaaaataaagagagttttagttattatatagtttaatatatagttgtattatttattttttaaatttagttatagtatttttgattatatatatttttattaaaaggattatattacgatataatttttaataatttgtatataaaattataagtgttaggagaagaaatagttgtcgagagtagtatgtgtattgtttaggtaggtgatttagttagtggtggggacgaatttattgatttttttaatttcgtgtaggttaggtttatttatggttaaggttgaaatatataagttttagtgggaggaatttgaaaattaagttaggtgaaaaggtttaggggtttttaattttggttttcgtttttgatagaattagaggagagaggtttggggtgttggaggtagaagaggttttgttttgtttaattttgagaggtagatttttagtttttaggatgtcggatattttttttttttttgttattgagttttttttttataggtagaattgtgggttgaattttgaggttagcgtttttgttttttaatgattattattaaatatttaggtttattgtttattaggtggtattttattttgagtattatatatttattttcgtgaatgttttagtttaatattatgagatggtttttattgtttttattttatagttgagagatagagtttcgatgatttgaggaaatttgtttagggttataggtcgtgtggttaaattttaataggggttaggtttatattaaagtttagttgagttttaaatagggggttattagattaggggtattagttttaggggttttttagggatttggagagataggaaagaaggtagagaatatattagaattattataaaatttttaattttatgtttttttaatgtgatttgcgtttgtttttttaatttgtattatgtttgtatatgtttgttagttgtatgtttaaaatatattattgaatggagtgtgtgattaaaagagtttggagatttttgttttaaatttttgttttagaaattttttttaaagtagcgggttttagaaaaggaagtagaattaagaagtagtagcggtttgggaggcgttcggatagaaggtgtttcgtgggcgggggggagtaattcgtgggttcgggaaaaggtttttaatttggttttattagattttttttagtttttgttgtttttttgtggttattacgtggtagatagaaagagtagtttttagtaggaagatatcgagggaggggtacggaggatgtagaaaataattttagaatcgtggaagggagcgaaggaaattagatattaaagattttaagttgtagtaatttaaatatgcgaagttgaagaatagtaaaacgaggcgggcgcggtggtttatgtttgtaattttagtattttgggaggttgaagcgggcggattatttgaggttaagagtttgagattagtttggttaatatggtgaaatttcgtttttattaaaaatataaaaattagtcggaaatcgtttgaattcggaaggcggaggttgtagtgagttaagattatgttattatattttagtttgggtaatagagtaagattttgttttaaaaaaaaaaaaaagaaaaaagaaaagaaatgtttttttttatagttttagaggttagaaaatttgagattaaggtattattgtttggtgagggttgttttttgtttttaatgtggtatttgttgttttattttttggaggggaggaatattgtgtttttacgtggtagggagtggaagggtaaaagggatgaattttttttattaagtttttttataatgatattaatttattcgtgtcggttttgttaaaaggtttttttaaaaggttttattttttaatagttgtatgggaattaaatttttaatatatgaattttgggagatatatttatagcgtagtttagtttaagtaatacgttgtgttaggattgcggggagggagggaatagttgtagaagtagggaataaagaatttggattgagatatgttttagttgatattttggtggggagtggaggaggtggttgatgtgaagaatgtgaagaaaatagtgattttattgaaaatatattcgatagttttttatttttattaggtgtttcgtatagtttggcgagagaggtagaaaggtttgagttttaaggagaggttagggttggagatattttattgtgtggttatagtttttttttagagtttgtaggagatatgtttatattattttttattatttttacgatgttatttgttttgtatgttttttttatttagattgggagttttggagggtagggtattgggggttagagagttttttaggtagatttttttaatgttcgaagtaaggttaggtttagaagtttcgtgaggaaggtaggtgaggaataggtagtttttgatttatgattgtgttaggttggggatttgggatttagggaagttttttttcgttttattattagtataggttaggattggagagtttattttttttggtgtttattaaatatatagggaagattagttgtgagtagattaaggtagtttagttgggtgattagtaagttttattattttaggttattttttttatatatcgtagtttgttttttgtttatattgcgtattttgagtgttttgatttttttattatttttttttttatttttttggatagtagttttgagataggttttgaatttttagttaagtatttattgtttatttttagtgttttatttatttttattagtttttatttatttttttattttaaattttagtttttttatttttttatgtttatttgagttttcgtttttagttgtttaagaatttttttttgatgtgaagaaaatagcgatttttttgaaaatatatttgatagttttttatttttagttagggttttatatagtttggcgagagaggtagagaaataataacgaaaaaaaaatatatacgtatatatatatatatagatatttatagatttataaatattttggatttttggagtttggatatattttttaaagggtaagtagttgttttgtttatttaattttattgataattattttgttatttatttttgtaattataaatttttggatttatttttttaaatatattttaatagattttttttttatattagattttagtatataattaatttttttgttatgaaaaaataaaaataaaaaatttatttgtgatatttttaatttttgtttgtagtttttaaatttaaaatggaagattgttaatttataattatatgtgtttagtaaaaattttaaagattgtttttagggttaattgttaatttttttaggaaagggataattagtaatgtcgttttagtttagagttttttaggacggtagttgatattggttaagttcgttaggtgttttttgtttatttttttttttttttatttagtatttatttatttatttacgttagttttaatttttttatagatgaaggaattgagtgaggtttagagaggttagttagtttgattaatattatattgtgttaaatttttaagttaagtgttttttttattattatatatttttttgttttatttattaaaaaattttttattatgtttttgttgcgaaagaaggaaagaaagaaagaaggaaggaaggaaggaaggaaggaaggaaagaaggaaggaaggaaggaaggaaagaaggaaggaaggaaagaaagaaggaaggaaggaaggaaggaaagaaggaatgaaggaaggaaggaaggaaagaaagaaggaaggaaggaaggaaggaaggaaggaaagaaagaaagaaagaaagaaagaaaattttttgtttttaaagttagaaaaataagtgaaaaaggtttaaggttattagcgagggttttagaattaaggtagtgcggttttgttttttttttttattttatttttgttttgttttttttagttatttttgattagtaagtaggatattgggtatgggttttaagtttgtgttattttgggtaggtcgcgttttttttttgggttttagtaaaagaagaaatgggattaagtgaatagttttaggttgtgttttttagtattttatattttatggtaattttgaagggttattttgggtaggggtggggttttaggaggggaaagatttagttagagcgttgattttatattttttttttattttgggattttagatatgagtttgatggataaaatttttttatatttgatatgatgaaaagaaagtttgaaagttagaggtaagattattttgaagattttttttaattttaaggtttttttatttttataggtgatttgatattattattttttttattacgttgatagtatttttattttgatttttgtgatgaggttatttggtatttatataggatggggtttttttgtggaaaatgaaggatttttatatttgcgaatttattatataagagttttaatatggttgagtatagtggtttatgtttgtaattttagtattttgggaggttaaggcgggtagattatttgaggttaggagtttaagattagtttggttaatataataaaattttatttttattaaaaatataaaaattagttaggtgtggtggtgtgtatttatagttttagttatttgggaggttagggtaggagaatcgtttgaatttgggaggtagaggttgtagtgagttaagatcgtattattgtattttagtttgggtaatatagtaagattttattttaaaaaatggaggaaaaaaaagagttttaattttagatgttttatttattaaaatttattgttaaataaataattaaaaaaattgttagttaattagaaggattgacgggggtgtttgattaattggaagtgttttgaagatgttttgattttataaggataattttgtaatgaatatatatatattttgtgagggtagggagggttttgttaagtatagggtagatagttaagtttggttaatttattgtttgaataaatgaatgaatatatgaatttttttttggtggttaagagtaatgtagggttttagttgttttgtagtatatgtggtttttaacgttatttttagttgtttttgttgttagtatttaatagttttttagttattttttattttttataatttattaaaatttttagtttttgggttattgtttttttttttattttatttttgttattattttttgtggtttttttattaattaagatattttatttaatattttggttttttattttgattttttgatttttttatttttagtgattttgttttttttttattatagttatttattttatagttatatttagattttgttattatttgtatttgtatttgaaatttttttataattttagttttaagtatttttttttttgtttttgtagattattttttttagtgtttatttttaaagattaaataatatttttatttttttagatttttaatttttttgattttgatattatgagattttgtgtttttttaattttatttcgtttaggttttatgaagtattgttgtaagagttattttgtattttaatttttattttttttattttttttattatgtttgtttgttaaaagtttagttttggttatttttaattttttatcgattttatgtttgtatttaagtagttgaagtggttggataaaaatatttaattatgtttattaaatatttataaattttaagttggttattagaaatatttagtagataatttgtgatggaattagagtaaagaaaagaaaaagaagtatacggtatttttttggttatttatttatagaattttaaggtaattattttatatttttttgtattttattatatagtttttattttttttatttttttttttttttttttttttttttttgagatagagttttattgtatggtttaggttggagtgtaatggcgtaatttcggtttatcgtaatttttgttttttgggtttaagtgatttttttgtttcggttttttaattagttaggattataggtatgtattattatattcggttaattttgtatttttagtagagacgagattttattatgttgtttaggttggttttaaatttttgatttaggtgatttattttttttagttttttaaaatgttgggattattggtatgagttaatgtgtttagtttattttttttatttttaattaataattaatttttttatttgggtattagattttattgttttttatttatttagggttatttttttagtaatattttattttttgtatatcgtttttttttttgtagtggtttatttttattagtaagtaaatatgttattttttttattttagaaaataaaaaatgaataaatataaattttttttagtatttaaattgaggttttttagtattattttttttaaaaagaaatatatagtagtttatgtataagatgagtttgaatattttattattagaaaataagaaaggtattaaagatattagtattttattaatttgaggttcgtattgtttaaatatggtataaatggagttttagtaaaaatagtgatagtaacggattaaaatatatttaaattaattgatttatagtgatattaaataaagggttattggttatttttggtagatgttagagaataaatttattattttgaaagttgttaaataaaggggaaagaatggtattaatttgttttttttaaataagttatgttaaaatagtagatgggatataatttgtataaatgaaattagtttagatagaataatagatttagaatatttgtattttataatttttaagaaaataatggatttagtaatgtttattatggttattaattagaattttatgttttttgatagaaatatagtataatattatttatgacgtagttttgttagaaaatagattatgaattatataaagtttttaaatttaattattagtttaagaagaaaatgggggaggtagaggaatatggtaaatggtatagtgatttaattagtaaaatttagaatgtggaaagttttataggaaataagttatttttttaataaataaatgttaagggggtaaaaaaagatttaaagagatttaagttttaagtttaattatgagaaaattattaaataaattttaaaagaggggtagtttgtataatatttgattagtatattttaaaattattaaggttattaaaaataaggaatattggtaaaattgttataattaagagggtttaaagagatatgataaatatatgaaatatggtaatttggaaggttaggcgtggtggtttacgtttgtaatttagtattttgggaggtcgaggcgggtagattatttgaggttaggagttcgagattagtttgtttaaatggggaaatttcgtttttatttaaaatataaaaaaattagtcgggtatggtggtgggtatttgtagttttaggtattcgggaggttgaagtagaagaattgtatgaaattaggaggcggaggttgtagtgagttaagattatattattgtaatttagtttgggtaataagagtaaaatttcgttttaaaaaaaaaaggaaaagaaatatggaattttggaatagataaaaagatattaggtgaaaattaagataatttgaatgaatgaagtatggacgttaataataatttatttttttttttttttgagatagagttttgttttgttgtttaggttggagtgtagtggtatgattttagtttattgtagtttttatttttaaggtttaagtgatttttttgttttagttttttaagtagttggaattataggtgtgttttattacgtttggttaatttttgtatttttagtagagatagggttttattatgttggttaggttggttttaaatttttggttttaggtgattcgtttattttagtttttcgaagtgttgggattataggcgtgagttattatgttcgattaatttattaatattgatttattaattataatatatatatttatatttacgtaagatgttattaataagggatattgaatttagggagggtatatgggaatattttgtattatttttttagtttttttataaatttaaaattgttttaaaatgtgaattttattttaaagaagagaaagagagatttaagatatatattaattgaatataatgtacggatattgttttgatattgatttaaattgtatatatatttaatggagaatttgggaaaattaaatattgtatatttgataatattaagaaattatgtaaattttttagaaataatattagtaaaatggttatattatttaagagtttttattttttaggatattgaaatatttgtgatagaaatgatataatattatattatattatgttatattatattatattatatttgggatttgttttaaaataatttggtatggaggttgggagtagagatggaattagagtggttttgaattttttttttttttagatagtgtttcgttttgttgtttaggtcggagtgttattttgatttattgtaattttcgttttttgagtttaagtgatttttttgttttagttattttagtagttggaattataggtatgtattattatgttcggttaatttttgtattttttattagagacggggttttattacgttggttaggttggttttgaatttttgattttaggtgatttatttgttttagttttttaaagtgttaggattataggtattagtggttttgaattaatgattattgtatttgggttacgggtatatgggagtttttttttattatttttatttatgtgtatgaattttttggaataatgagttttttaaaattttttatgattttatatgttgtttcgttagatatattttttttgtagtttttgatagtaaaattttttaagaaattttataatataaaatgtttttattttttttttttttatagatttattgaggtataatttatatattataaaatttatttattttggtcgggcgtagtggtttatagttgtaattttagtattttgggaggtcgaggtggatggattatttgaggttaggagttcgagattagtttggttaatacggtgaaatttcgtttttattaaaaatataaaaattagttaggtgtagtggtggttttttgtaattttagttattcgggaggttgaggtaagagaattgtttgaatttgggaggtggagattgtagtgagttaagatggtattattgtattgtagtttgggtaatagatcgagattttattttaaagaagaaaaaattatttattttaagtgtataatttaatgattttagtatatttatagagttgtaaaattattattataatttaattttgaaatatttttattatattaaaaagaaattttatatttttttgtatttagtttttattttaaatttgagttttagataattattaatttttttgtttttatagatttgtttattttagatatttcgtgtaagtggatttttgtagttttttgagtttagttttttttatttagtataatgtttttgaggtttatttattttgtagtatgtatttatattttatttatttttattgttgaatagtattttattgtatggatatatttttttttttttttttttttgagatagagttttgttttgttatttaggttggagtgtagtggtgtgattttagtttattgtaatttttgttttttaggtttaagtaatttttttgttttagttttttaagtaattgggattataggggtgtattattatgtttagttaaattttttgtatttttagtagagacggggttttattatgttggttagtttggttttaaatttttgattttaagtgatgtatttgttttagttttttaaagggatatattatattttgtttattaatttattgattaatggatatttggttgtttttattttatatttattgtgaataatattgttatgaatttttatataagtatttgtgtggataatacgtttttatttttttttttttttttttttttttgagatagagttttgtttttgttgtttatgttggagtgtaatagcgtaattttagtttatcgtaattttcgttttttgggtttaagtgatttttttgttttagttttttaagtagttgggattataggtatgtattattatgtttagttaatttttgtatttttagtagagatggggtttttttatgttggttaggttggttttaaatttttgatttcgggtgattcgtttatttcggttttttaaatttttgggattataggcgtgagttattatatttggtttgtttttattttttttaggtagatatttaggaatttaattgttgagttatatggaaaatttgtgttgaatgttttaaggatttaattagttgtttttaagttttaagataagatgacgtagatgtttttttgattttttttgttaaatatagttataattttggatggtatatataaaataaatataagaagattttgaaagatgtagagaaggtagattggttaggaattttaagattcgaaaaaataatatagtggtgagttttttgggtttggtttttgttttatatatataagattgggtgttggaaaagttagtaattaggaaattttaataggaagatgaaaaaaatttcggaaagtttttggttaaaggattaataaaggaatattttggaaagataaaatttttagataatgattattttattttaggtaaaaaaaaaaaaaaaaaaaaaaaatatttttatttttatatttgttaataaaggatgagtggggagtttagttattaatttttatttagttgaggtatttttttttagtaagtaggaagttgggatttttagtttcgtttggtggtatgaaatttttttttattataattagtgttattggagatttcgtggggaataggaatgaggtgttttttatttttttagttagggtgtgttagtagagatttagtgggaagtttgaatttttatttatatttagtaataataaggagtacggtttttttaagtgtttatagaggttaagtgaggaatttgggttttttttttaatttgatagtagtgaggtagtattttttttgtttaattagtgcggtgttaaaggatgattattaaaatagatttaaataagatttagagttttataatatataatttaaaatgtgtaggatgtaagcgaaaattatttgttatattaagaatcgggaaaattttgaataagaaaagataattaatagatattaatatttaagttgatttaaatgttggaattatttgatgtatatttaaagtaagtaagtattttaaaataagtattaaaaatgttttataggttaggtatattggtttatttttgtaattttagtattttgggaggttaaggcgggtggattatttaaggttaggagttcgagattagtttgattaatatggcgaaatttcgtttttattaaatatataaatattagttgggtatggtggtgtatgtttgtaattttagttattagggatgttgaggtaggagaattatttgaatttagaggtagaggttgtagtgagttgagattatgttattgtattttaatttgggtgatagagtaatattttattttaaaaaaaaaaaaagttttataggttaggtatattggtttatatttgtaattttagtattttgggaggtcgaggtaggtagattatttgaggttaggagtttaaaattagtttggttaatatggtaaaattttatttttattaaaaatataaaaattagttagatatggtggtagatgtttataattttagttatttaagagattgaggtaggagaattatttgaatttgggaggtggaggttgtagtgagttaagattgtattgttgtattttagtttgggtaatcgagtgagattttgttttaaaaaaaaaaaaagttttatagttaagtgtagtggtttatgtttggtgggaggattatttgagtttaggagtttatgattagtaatatagggaaatgttgtttttataaaaaataataataaaatagtaataataataataataataataataattatttaggaatggtagtgtgtatttgtggttttagttttttggaaaaaaaagtgtttttaattagttagatatggtggtgtgtatttgtggtattagttatttgaaggttgaggtgggaggattatttgagtttaggaggttaaggttgtagtgagttatgattgtattttagtttgggtaatagagtaagattttgttttaaaaagaaaaggaaaaaaaaaaaaataatatttaataagtaattataaatttttttgaaataaatgaaaattagaaattttggtaaagaaatggaagatataaagaagaattaggttgggtgaggtggtttatatttgtaattttagtattttgagaggcggaggtgggcggattatgaggttaagagattaagattattttggttaatatggtgaaatttcgtttttattaaaaatataaaaagttagttaggtatggtggtaggtgtttggaattttagttatttgggaggttgaggtaggagaattatttgaatttgggaggtagaggttgtagtgagttaagatcgtattattgtattttagtttgggtaaaaatagcgaaattttatttttaaaaaaaaaaaaaagaagaagaagaattaaatagaaattttagaatttagaaatataattatgaaaattgaagatttaatagattggtttaatagtagattggagaggatagaggaaagatttagcgaatttaaaggtagaagagaaattatttaatttggataacggagaaaaatagattgaaaaaaatgaatagaggtttatttatgggattgtaataaaagagttaattaacgttttgttattagtatttaagaagaagagagagagaatggagtaggaaaatgtatttaaagaaataatgtttgaaaaatttttaaatttggtaaaagatattaattgattgatgtaagaagttaagtgaattttaaatagtatgtttttatgtatttgatggttatttatatattttttttggtgaaatgtttatttaaattttttgtttattttttattgttattattgagttataaaagttttttttatattttagatataagttttttatttgataaatgatttgtaaatatttgattttattttattgtttttgtttatttttttatttttttatggttgttgttatttttatgtttgtttttttttttaatgaaggtaatttttatttttttttttttttttttttttttttttttgagatagagttttgttttattatttaggcgggagtgtagtggtatgatttcggtttattataatttttaatttttaggtttaagaaattattttgttttagttttttaagtagttgggattatatgtatgtattattatgtttggttaatttttgtattttttagagatagggttttattatgttggttaggttggttttaaatttttggttttaagtgatttatttgtttcggttttttaaagtgttaggattataggtgtaagttattatatttagtttttatttttttgatggtgttttttggagtataaaagtttttaattttgatgaaatttaattattaatattttatttgaagtatgggtaatatagtgagattttgtttttatattaaaaaaaaaaaaaaaaaatttaataattaattaagcgtggttgtatgtatttgtagttttagttatttaggaagttgaggtaggaggattatttgagttcgggagttgaggttgtagtgaattatgattgtattatggtattttagattgggtgatatattaggattttgtttttaaaaataaaatattattttattgtttgtgtagatgtaagaaagtattatatgtaagaaattattgtttagtttaatattatgaatatttatttttaggtttttttttaatagttttatagttttgtatttatatttaggtttatgattaattttaagttggttttttgtgtatggtatgaggtaatataggaattataagttataaattttttttaagtatagttttagttatatgttaaaaattaattttgatatgttttgttttaatttttatttagtttgaaatattttttggttttttttgtgatttttttttttatttattggttgtttagaagtatgttgtttaatttttatatatttgtaatttttttaaattttttgttgttgttgatttttaatttaattttattgtgattagagaatatttttgtattattttagtttttttaaaattattgagacgtgttttatggtttagtatatggtttattttggagaacgttttatgtatatttgagaaaaatggtatattttgttattgtttagtagagtgttttatagatgttcgttagatttagttagttgatagtgttatttaagttttttgtttaaggatagtttttattttttagttttttttgtggattgaagataattgtttttttaaggttatattttttttaggagtaatttattttttatgattgattaatgtggggggtaaaaatttagtttttttgttttagttggggatggttttgaagggttattttagtttcgggttaaattttaaagtttattttttggagatttaatttgtgtattttttatttagttaaattatatttattttagttttaaaatatattttaaattagatttattatgttttaattattttttattggttattatatcgagaatggtttgggttaatagttgggggtaagttggaagtaagggtgttaggtaggatgttattataatatttttaattagagatggtaggggtgtggtgatgagtagtttaatttggtatttatttttgaaattatagttgttattttttattgattttttagtttttttttttttttttttttttttttttttttttttttttttttttgagatagagttttattttgttatttaggttggagtgtagtggtataattttagtttattgtaatttttatttttcgggtttaagcgatttttttgttttaatttttcgagtagttgggattataggcgtgtattattatgttcggttaatttttgtatttttagtagagatggggttttattatattggttaggttggttttaaatttttgattttaggtgatttatttgttttggttttttaaagtgttgggattataggtgtgagttattacgttcggtttgaggtagagttttgttttgttatttacgttggagtgtaatggtttaattttagtttagtgtaatttttattttttaggtttaagtggtttttttgttttagtttttggagtagttgagattataggcgtgtgttattatgtttggttgatttttgtatttttggtggagatacggttttattatgttggttaggttagtttcgaatttttgattttagatgattttatttttattatttaaagtgttgggattataggtgtgagttatcgtattcgattaattttttaatttaaagtagtttttaagtttttttttttttttttattttgttttatattattttatattttttatcgttatttgatattatattttatatttatttggtatttgtttattttgtttaagattataaatttagggtttaaaatattgcggggtataaagattgtgtttaataaatattgtgtaaatgaattgataagtaaataagtaaatgatatgtattagtatttattgaatgttgtattgaatgttagtaaaggtataagagaatgtttggatttgtagtttttgatgtaatcgaagtagaaatttgttttttagttatgtttatattagttttttaaatgataaaaaataaattttattaagatagatggcgttttagggtagaaagaatatgggtttggatgtgaataatttatatttgaaatatatttagtagttatatgaatttgtataagtgatttaatttttttgagttttatattttattgtgggtggaggtaatggtattttttttttgggggtattttaagtgagatagtgtacgttgagttgaggttttgttttatatattgaggtatggttaagtttaaaaataagtaaatgaaaaagataaaaatttttgattttgtggaattggtagttagtaaataagaaatataaattaaatatatgttagttagatggtgagaaataataaggagaaaagttaatgggggtggggaatatgagagaaggtttttagttttgaaatggggtagttaaggaaggttttgattaggtgttttttgagatgagggatagagttacgaagatagttggggaaggaagtagtttaggtagtgagaagaataaggttttaaggtgtgaatgtgtttgttttaagaatagtaggaagttaatggggttggatggtgagaagtaattaaagatgaggttagagagggaagggttttggttggggggtagtggtttatgtttgtaattttagtattttgggaggtcgaggtaggtaggttaggagatcgagattattttggttaatacggtgaaattttatttttattaaaaatataaaaaaatagttcggcgtggtagtacgtatttgtagttttagttatttaggaggttgaggtaggagaatcgtttgaatcggggaggcggaggttgtagtgagtcgagattgtattattgtattttagtttgggttatagagtaagattgcgttttattaaaaaaaaaagagagagagagaaagagattgagagggaaaggttttgtgtagagttttgtaggttttgtaggaaagttagttttattttgagtgagtggagaagcgattggagatttttgagtagaggagtgaggtggtttaatttgtattttaattgatttattttggttgttgtgtagagatatggataaggagagtaaggatagtagtaggaagataagttaggagatgtaagagatgatataggtttggattaggatattggtaatagggatgagaagagatgagaagtgtttagattttggatatatatatttttttttttttttttgagatggagtttcgttttgtcgtttaggttggattgcggattgtagtggcgtaatttcggtttattgtaagtttcgtttttcgggtttacgttatttttttgttttagtttttcgagtagttgggattataggcgttcgttatcgcgttcggttaattttttgtatttttagtagagacggggttttattttgttagttaggatggtttcgattttttgattttatgatttattcgttttagttttttaaagtgttgggattataggcgtgagttatcgcgttcggtttggatatatatattttgaaggtagagtttataggatttaagatagtttggatgtggagtatgagaaaaagagaggaattagtaatatttttaaggatttgggtttaaataatggaaagaatagaattgtaaaatttaattttattaggaaggaagagaaggttaagggagaagattaggttagttttggatatgttaagtttgtggtatttgtatttggaagtataagtttggagtttcgggaagtgtatgattttgagagttattagtataaaggtggtttttatagatggtatttgaatttggtagggagttaggagattggatgagattatttagggagatagaaaattagaagaggtttagggaataattatggatattataatggtaagaggttggcgagatgaagagtaattaatagggaggtagagagggaggggtttggggtaacggggggttttatatttttcgaattatatatttataaataatttttaagagtggattatttttgtttattttttattttttttttttttttattttggttttattttgttattttggttggattgtagtggtatgattatggttcgttgtagttttaattttttgggtttaagtgatttttttacgttagttttttaagtagttggggtaacgggtgtgtattattacggtttgttaatttttgtatttttttatagggatggggtttttttatgttgtttaggttgattttgaatttttgggattaagtgatttttttattttggttttttaaagtgttgggagtataggtatgagttatcgttgtatttggtatttttgtttatttttatggttatagtggtttattgttttttttgtgtttggatatattattagggttaatttcggagtttattttttaaggttataagtttttatgattgaagtgtgaatgattgataggtttattttttttagggggtatataatgaaagaaaatttttttaataaaatgaatttttatttgatgaaatattgtaggaaaaagggttattttttagagggaattatttgtatttttggtatgttgtagtttattgtagtgatgatggtattattttggttagtattaatttttgggaagttattgggaaggagaaataagtttttgggggagtattaatattgttttgggttgtaaggttttagaggttaggaaaagtatttgggatttaagtatagtttataatgtttgagtaggtgtatattgttttattttaagtaggataaagtaagaagtgggtaggtagttttttgatattgtttttaaatttagtttttgtttattatatttttggtttttttttatttaattatttttttgttttcgttgtaatttttttttttttttatgttttagtttagtgttttagtttttttttttataaatggtgttagattgttaatattgtagaaatggtgagtttagttttttttattaaggttttcgcggttttatgagaaatttgttgtttttttttattttttttttattatttattagtattaaatttttagttagtaaattagagagtataaaagtagggatttttatattagggttttttttttttatatttatagttgtttttttaattaaggaaggtgatgggaaaatgataatgatattaataggataatgggataaaagtatggataggaaatttataaaagtatggataggaaatacgaatagttattaaatagttaaaaagaatgttgatatttaataataaatgtgtagtttaaaggagtaataagagattattttatttattaaagtggcgaggattttaatgtggagggttggcgagagtaaggatataggtagatattattaattggagtagaaaggttttattgttttttggagaatggtttggtaatatatagagattaagagttttaaaataagtttatgtttttatttttttatttagggtttttatttttagaatttagtttaaggtaataattagttatgtaaatatgtaagtttaaggatatttatcgaaggtttgggcgcggtggtttatatttataattttagtattttgggaggtcgaaagaggtggttagattatttgaggttaggagttcgagattagtttggataatatgatgaaatttcgtttttattaaaaatataaaaattagttaggtatgtgtttgtaattttagttatttaggaggttgaggtaggagtagtttgaatttaggaagtagaggttgtcgtgaatcgagattatattattgtattttattttggataatagagtgagattttattttaaaaaaaaaaaaaaaaagaagaagaaaaagaaaaaaaaagaatatttattatagtttagtttattatatgtttaaaaattgaaggttaggtgtggtggtatatatttgtaattttagagttttgggaggtcgaggaaggaggttgttgtgagtttaggaatttaaggttatagtgagttatgtgcgtgttattgtattttagtttgagtgatagagtaagattttgtttttaaaaaaatagaaagtaaattgagatttatttaaatatgttataataggaaattggtttaaatgaattagtagaatattgggtgattattataaatgatgttggtttacgggtttttaaatgtgatatattggtatttgtgtttaaaaatgtataaatattagatatatttaaatttaggaatagtttataaaataattgttttgtatgtttaaaaatgttagtatcggttaggtgcggtggtttacgtttataattttagtattttgggaggttaagatgggtggattgtttaagtttaggaatttgagattagtttgggtattatggtgaaattttgtttttattaaaatataaaaagttagttaggcgtggtggtgggcgtttgtaattttagttatttaggaggttgaggtacgagaattgtttgaatttaggcggtggaggttgtagtgagttaaggtcgtgttattgtaatttagtttggattgttttaaaaaaaaaaaaaaaaaaagttaatataatgaaaggtaaagtatatttaaggtattgtatttatattaaaggaaattaaaaagattcgatagttaaatgtaacgtaggatgttaaatgagattttagattaaaggaaaaaattgttatgaaggatattatggggtaattggtaggatttgaatttggattgttaattagattatagtattatatcggtttaagttttttgatttggataattgtattatattatgtaaaagaatgttttgtttttagaaaatttgtattgatggatttaagggtaaagggtattttgtatgtaatttatttttaaatggtttagtaaaaaatataaatgtgtatttatagagaaataatgataaagtaaatgtggttaaatgatattagtggatgaatttgagtgaagggtattttggaattttttttagtatttttgttttttttttatgagattaaaagtattttaaaataaaaagttaaaaaaaggaagaaagtggtgttggtgaagtatatttttcggtaggggaaggtttttaggtgtattagtagtagttatgagtgttttaatattagggagagtatagttgttattgatattttttgttattttggatttttagttttttgtgttattaaaggaatttagtgtgtggttgattttaaagttgttttgggttgatttaagaaggtaggatgagtattttgaggtaaagaatttttttttgtgattttattgattttaattttgtattttgattggtattttttgtattttaaggattttgatagcggagggaggtagagatggaggaagtgaaaattatttaaatttagtgtttgttatagataatttagattgtaaaatttagggtagattatgtttatttattattgataatgatagttttaatatttttttataataggaagattaagatttttttaaaatcggttagtattttgtttattcgttagaaggagaaaaataagttttggtaagagttaagataaggtttagaagtttttgggtttttttagttaaggtgagtggttttaaattatgataagttgtaggttttttgagaagtatttgtaataatttggtaaattaagtatttttttttgggaggaggaatatagaattttgtaattatttaatatttgtttttaggttttgttttttttggggtatacggtagttattttgtaatttttatttttagaaaggagagattagattaataaatagtagggttgggattgtttagggggtttcgagattttttttttttttttattatttgttttttaggtatatcgttttatttttttttatttttttaggggttgttagggatagaaggttttttttttattttttttagtgtttttttatttttttttcgttttttattattagggtgtttaggatattgtgtgatttaggaaatagtttagacgtgaggtttgtagtaggtcgaggaggaagaagaggggtagtgggagtagaggaggtggtttttgttttagtgagagttttgagggtttttgtttgaagagggatagggattggggtttggagaaggggttgtggaatgtagttttttttattgttgttgttgttgttgttgttgttgttatgtgttttagtggttagatttagaggtgaggtatggcgtgggtgaggtgaggggatttagtttttttaggaggatgtttagtggggtgggggaagagggttaagttttaggtcgtgtgagggatgttggatggaggagatttttattgtttaaatagagacggtttttagggaaagacggttttgtttatggagttgttttgggtttggtgttaggggtggtgattgttgggggatgggtgagagggtgtttatttttaggaagaatttcgttagtattggtattggaggatttttgtagttatagggaagaggggaagagggaatatattgattatttgtttggggaggagatgagagggaagtaggagatggggatatgaaaggttaggtttattaagtttttttttagtttagttgtttttatttttcggatggtttaatgttcggttttttcgggaggaaattttttcgaagttttagttatttatttttcgggagttattttcgttttttttttgatttttgttgttttgttttcgagagatggagttcgaggttggatttgggaggttagagaataaataggaaaggggggtagggattagtaattgggacggagggtattggggttggggttgggtattatgtggagagtggggatagatgtgaagaagaggtggtttagagtatttgtgggagttgttgtgggtaggttttttaggagtatttagaagaggaaaggtggaggtatagtatttagggtttttattgcgtttgtttttttttttttagggttgttgtgtgggagttttttagaattttgtgttaatggaggtatttgtttgagtttgtttttgggataagggatttgttagtgagtgtgttttgtaggagtgggagattggagagaaagggggagggagagtagggggggagaggtgaggaagtgagattaaagaagaaagagaggaagtgaaggagatgaagggaaataaatgaaggtagaggagggagtgggtaagaataggaagaggggttagtgatgtgagtttttttttttttttttgtttaggtgtgtttttggttttttgggtgagacgtgttagttttttgatttttgttagaacgtttagttttgttaaaatggaggtagttgttaagttttgtttttcgtttttttagggttttttagttttttttttttattgatatttagttttttgtgtatttgtttttttggttttattggcgagagatgttaggttaagtttgaagatttttgttttttttttttttgttttaaaaggggtcgttgttatatttaggtttcgggtcgtttatagtgtttttgtatgtttggatggataggtaagcgttgttgggggtagttaggaggggataggtaggagtaatgggttaggttgtgggtggggaagatagaattggagtttgagaaattgtaagttttttgaagatagaagttatgagaattaatatgttaatttttggtaatttatttatttataattaatatttattagtatggttgtattgattgttaaaatgttaaaatatttttaaattaagggtgttatgagttttttttgtgtattattttgatgtttgttttagtttttttaatttttttattgtttagtagttagaagagggttattgttttgtatattaggggttttttagatttttgtattttgagtatttgaatggtttttattttgagtggagggagttattatattatttgggaagattgtagtggtgggaggggtatcgggaagggaaggatgtgatttagagagtggattgggggtcgttttaggaggaggggtgtaattttggggtaagtttagtgttttattttaggggttttgtattagtttttggatttaaatgttagttttgttattgattagttatatgattttatataagatattttagttttttggtgtttagttgttagttgataaatagggagagtaatggttatattttataaggttgttgagaggatagaaggggtcgatgtttaggagatgtttgtttagtttagtatttggtatttttattgttgtcgttattattattggtgtatatggattgtgaagtgagtttttaggtgtttaaatttatttaaagattaggaaatgaggtttagaaaggtaaagtggtttatttaagggtatataattagttgtggtatagtatggtgttatttgagttttttgtttgtagacgtggggtgttttttattttttttaagattatttacgttttagatttttttaggtaaggttaatttgtaatatttttattattattttagaagatatggttattttagataaatttttttaagttatgatatcgtttagagtaggggtgatggaatagagtaaagaaagtatggtaataaagggaaggaaatatgaaaatgagatttagagataatttagagtgagtattgggtaattttagatgggttagaattcgtataatgttagaaacggttttttttgttttttgttttaggtgagtagtgttagtttcgggatttttgtttagttaatttatgtgttaatggaggggtgtgtttggttacgtatttttagatttagtgttattgtttatcgggtttcgagggttatgtttgtgaacgtgatgttaacgagtgtttttaggatttaggattttgttttaaaggtattttttgttataatattttgggttttttttagtgtttttgttttgtggggtaggagggtttacgttgtgagttgcgggtaggattttgtttttttaggggttgttcgaatgggggtatttgttagttgatgttagagaaagattttattttttatttttgtttttgttttttaggtgtgtttttataggggtttttcggtcgtttttttttttgggtagggtaggatgttttcgttggagtttttttttatagttgatttatgattttgttaggttttataggttcgggttgtgaggtgaatttagataattgtgttagttattaatgttagaatgggggtatttgttaggatgggttggatatttatatttgtttttgtttagaaatttggataggtgagttgtttaagttatatttatgatatttatggtttagagagttggtttttggttttttttatttatagggtttttagttttagttttcgttttttttttaattttttgtaggttgggattgtttcgaagatgtggatgagtgtgaggtttagggttttttttattgtagaaacgggggtatttgttagaattttgttggtagtttttattgcgtgtgtgtgagtggttgggggggtataagttgtgaggagaatttggatgattgtattgttgttatttgtgtttcgggatttatttgtattgatcgggtgggtttttttttttgtttttgtttatttggacgtataggtatgggggtagagggtattaggaggtgggaggtagagaaggagggtgagagaagtattaggaggattgttaggagttttaaatggtttttgagagttttatttttttttatttttttaggatttttgtgttatttggaagatatgtgtttgagttagtcgtgttatggggatgtttaatgtagtattaatttttttataggttttatattttgtttgtgttagtttggttattcggggtttatttgttattaggatttggacgagtgtttgatgggtgaggttatttttattttagagtttttttgagttttagataggtttttgtattgaagatagaaaagggggtagattgtttttttaattaaaaaattaaatatttttttttttgaatttgtttagatttggtattttttgtttatatgattttttttttaatgtttagttttttagtttttatgaatttggttttttattttttttttattttaaagatataagttttttttttaatttggtttcgtttgttatacgtaggtttttatattttttttgatagttttatttttttgttttttttgttttgatttttgtggatttttagtttttttttttttttagtttagtaaggtttaagtttttgtgaatatggcggtttttgttttaatatttttggtttttttaattgtttttgtttatttggttatataggttttcgttgtgaggttgattataatgagtgttttttttagttttgttatttaggaagtatttgtttggatttatttgttattttttattgtttttgttcgttaggtattagttggatggggttttgggtggggaaaatagggaattagttttgaatttattaggaatgttttttttagagtaaggatagttttaggttaattggcgtaagttattatagatgtttttttttttatttttagacgaaaatttagggatatttaagatttttgggagaggggttattatagatggtagtgaggttatgtattttttaatttggggggaagttgttatttattttatagttattatagaggttgtataatttggtttattgtatatagtagtttagtaagagagggtagaagagtagtttataaattttttgtgttgtagtttttgtttaggttaatttagaatgttttttttgattatagaaatttttttatgtagagatttaaggtaattttttaaaattttaaaagttttgtgatataataggaaaatttggtataataagaaaaaaattgttgtaagatagtatttatttttaggttagttttaagggggaaaagtcgttttagggagatagtaatagagttaatattaaggagttgaatgaaattagaaaaataatcgttaattttatgttaggtattgtttgagtattttataggtattgttttatttatttattataataattttatgaggttagtattgtttattttataattgaagaaattgaggtatagagagtttaagtgatttgtttaaggttatttagttagtaagtggtagagttgagatttaaattaagggttttaataattataattattattttatattgattttttaaattgagcggtatttaaagatattggtttaggttatttaatagataattatagagaaataagagaaaacggttcggtaatttaagggataatattgtagatattaaggagttttagaagtagattttttaggtaagaaaagaaaggaagttaaggtttagaggttgattttattttaatttaggatgaaatagtggagattaggatgaatttaaagtaacgggataaatataggagtaataagttttttagatgtattttaaatttttttattttgggatttttgttttttttagtatggaggttcgtttagggagaataagaagtgggatttattttttaagttaatttgtttttatttgtattttgaggtttttcgggttgattagtttgttttggtgagtttcgttttttgtatatataggaatggttattagaaagttttgtagttttttcgtaggtttttagtaagtattttgttttttggttttttatattttaaggagtagggttatatattgcgaagtagtagggttttagggtttattttatttaattttatgtagatagtatttcgggggaggatcgtttgagtggggtaagttaggagtagggtcgattttagaatataggttttttaggtagatttggttgagttatagtttttatggtttttatgtttttaggtttagaagggtagttttgtgaggtggagattaacgagtgtgttttagttttttgtttgaattacgcggattgttatgatttgtttaacggtttttagtgtatttgtttgtttggtgagtatagatgtttttttggttatttttagattttaggtttttgaatttgtagagtttaggtttagtaattatttaaggttatttgaagttttttttagttaagttaaggagttttttaaatttgtttttgttttttaaaatttttatttttatatttttaaatttttttttgtttatttgtttatttttatttttgttttattaaattatttaaagattttttttttttagtttttttgtatagtttttgtgtatgtatgttgaggttttaggttggttttggtatttttattataaatttagtaaaagttgttttaagttttttttttttagttttatcggatatttttttgttttttgttattataataattatatttatttattatttattttaggttagttatttggttgagtattttttaggcgttatgttatttaatttttttaatagtattatgaggtaggttttattattattttttttttatatagaataggaaattggggtttagagggttgattagtttgtttaaagttatatagttggtaggtggttgagttttattttttttgtattattttttgttattttacgtttatttgttttaggtgttttttttgggaagttttgtaagtttattttttttggtaagggaaggcgttatgttgtgtttttttcgatgattttggttttttttttttatttattttcgttttattaggatttttcggtattcgatgtgaggaggatatcgatgagtgtagaagttttttttgtgttaatggtgggtagtgttaggattagtttggagttttttattgtaagtgttttttaggtaaattggggtatatattgtgggggatagcgggagtaggaggtagatattcgtgtaggtttttgatttttttgttgtgttataggttttgaagggttacgttgttaaatagaggtggatgagtgtttgagtgatttatgtttcgttggagttagttgttttgattttttaggagtttttttttgtttttgtttttttggttttataggtttataggggaggtattggaaagaattggtagaatattttattttatttgggttggggtagagtttattggtgggtgtttgatggttgggatgtgagaatagaatgagaatggtattttttaaagttatttagtgtaaaatttgtataattgtataattatggggataagggtaggggttatcgtagggtttatatgggtttagtgtaaatggtgtgattgcggtttgggagtagaggacggggtttaaagaaaaggtatttatttgtttatttagtaagtatttattaacgtttattatgttagatacggaggtaaatttgagtaagatagttgttatttttatgtgattttaagtttaatatagagagattagtaagttttttgttgattatagtttatagaggtgttttgagagaaaaacgtgtaggatattataagagtatagaggattagttaatttagattaaaaatggaggaggtgatggttgagatgagttttgaaagataagtagaggttgggcgtggtggtttacgtttatagttttagtatttcgggaagtcgaggcgggtggattatttgagattaggagttcgagattagtttggttaatatggtgaaatttcgtttttattaaaaatataaaaattatattttgggaggtcgaggcgggtggattatgaggttaggagattaatattattttggttaatacggtgaaattttattttaattaaaaatataaaaaaataattgggcgtggtggcgggcgtttatagttttagttattttagaggttgaggtaggagaatggcgtgaattcgggaggcggagtttgtagtgagttgagattacgttattgtattttagtttgggtggtagagtaagattttattttaaaaaatataaaaatataaaaattagttaggcgtggtggcgggcgtttgtaattttagttattggggaggttgaggtaagagaatcgtttgaatttgggaagtagtggttgtagtgagtcgagattattttattgtattttagtttgggtgatagagtaagattttattttaaaaaaaaaagaaggaaggaaggaaggaaagaaggaaggaaggaaggagagaagggaaggaaaggaggaaatgaggaaagagagaaagatagaaagatggatggttaggagtttgtttaaatagagtgttagatagtgtgttttagttggagataattgtatgtgtaaagatatagatggaagaaaagtttattttatttaaggaattgtaagaaagttagagttaagggtatagtaaggtaaagatgagaaatatagttgttgtataaatgttatgttttgtaggattttgtatattattttgagaaagttaaataatattttaaaggtaatagggatttattgaaggataggtttatgggtttatagggagtgagtaaggtaagtataagaagtggttttggtttaatgaaggatgtggttttggtttaatgaaggatgtggaggagttgttttttttttgatttatttttttattttaggttagttttgtgaggtttttttgtgtgtttttaatttgtgttagtttaagtagatatgtaaggattagaaagataaggttaattgtttttgttttgatggaagttttggttgtgttttatttgaggataattgtatttgttattacgggtattgttagaggtaatattttttagattttttttatttgtttttttttttgggtttttttcgttaggataggagaagatagttagtgagatgtaggtttgtgagaaatgattaatggggaaaaggaaggagatggtaaagtttttagggtaaggtagtgggagggtttaattggtaagtgttatttaaggagaagagagtttataaaaattggtggaaatagaggattagggggttagagtagaaagaagagtattaaattttagggcgaattaattatttattagaaaaatatttgttgaggttaggcgtagtgttgattacggttttatgtcggtaattttagtattttgggaggtcgaggtgggcggattatttgagattagtagtttaatattagtttggttaatatggtgaaattttgtagttattaaaaatgtaaaaattagttgggtatggtggcgtatttgtaattttagttatttgggaggttgaagcggaaggattatttgaatttaagaggcggaggttgtagttagttaagattatgttattgtattttagtttgggtgatagagtaagatttcgttttaaaaaaaaaaaaatttgttgagtatttattttgtgtggttattgttttaggttttgggggaaatataaagtaaaagagataaagtaattgttttcgtagagtttttattttaaagaaagatagaaaataagtaagttatagaaagaatatatatgtgtgtgtatatatatatatatatatatatatatatatatatatatatatatttttaattagatatatagatgtatatatttagttggagaaaatgagtaggtgttggggaggatgggggcggtgttgagagtaaagttattgaagaaagaggttagaattttagggttaaaagaagaggaagttataggggtttaggtagtagggaggggaatataagtagtaggagaagagaaaaatttttttttttttttttataattagatttttatgtgtgtgtgacgtgggttggacggggttagagtgtgaggtagagttagggggttgtatttttgtattttgtgtttatggggggatttgttatttttagttttttggttataattgtatttgttttataggttatataggtgagattttttttaaattatatatattttgtgttggttattttttatgttaagggtaaggtaggcgattacgggttttgagttttagttattattaaggagaattggattgtaggggatacgggtgatgtgtgggaggtggtgagaacggaggttgatgggaaagaataatagggttggggatgaggaagggaaggaagaggaaagagaaggagagcggagggagggaaggaggatatttttttttagtttttatttgttttttttaggatttatttgtagtgaggagatgatagtttgttatttagggttatgttttaatggcggtttttgtaattttagttttggaggttattattgtatttgttttttaagttatatagggttttagtgttaaattagtattgattattgtgtgtttggtgagtgtttattgtgttatggggttggggtttataggagaatggaagaattaaggagggtatgtttgtgttatattttttaaaatttaattgaatagattagtttgggaaatataatgaaattttatttttaaattagttgggtatatagtggttaaggtttgtagttttaaatatttgggaggttaaggtgggaggatgatttgagtttagaaggttaagattgtagtgagttttgatggtattattgtttgggtaatagagtaagattttatttaaaaataataaaatattatataaataaaaattaattggatggtagtgagttgtcgttttgatgggggtggggggtgtatgttttatgtatagtgtgattgaggttataggttaggttataggtaaggaatttaaatttttatagttttttttttttagtttcgtgttttaatgggggtatttgtgtgaataggtttggtatttttttttgtttttgtgttatgggtttttagggttcgcgttgtgagggaaagtttcgttttagttgtgtagataggtgagtagggtttaaagatttttagaagggagaaaattttttagtttttttatttttttttttatttttttttgggttttaggttgttttttattttatatttcgtttcgtttttttttttggtttgttatttttttgtggttgtttttcgataatattatatattattttttttttgttgttcgaatttttttttattatgttttgtttttgttttgtttagtttttgtaggaatagggtaatttgttaggatagtttttagggttttcgttgtttttgttttattggttatatcggaggtagttgttaggtgagggttattgaagttaggcgtgttgaggagggaagtggttgggagggaaattagggagggttatttggttttaggttatttaggagaaggtttttgaagtaagggatttcgaggagttggagtgggtagaggattatttttgggttgagaatttgatgttatgttttgttttacgtttttttttattttttagattttgatggatttatgtgtttagaagttttgtttacgtaatttttattgtttttagattgggttttttttttattgtttgtgtttttagggatggatcgggtttttttgtaattttttattgtttttttgttagaaggttgtattgagttaaggtaattaatatcggtattgattggagagtaaatgaagaaaatatgggtgtttttatttgtttcgtttttgtgggtttttatatagtttttggttaaaataattatttgagaattaaaattatatagataaattagtttttgattgtagaggtgttgaattgtgtaattagagaagtttaatataatttttgttattttatttaacgtaatttaagtaatattaattagtttattttataggattttagtttaatttaattatgagggatatgatttaacgtggagtaatttaattttgttttgattattataatttaggtagagtggattatatttaatttagttatatttaacgtattttattttattttatttatttcgatgttacgttattttttttgtaaaagaatattaaaataaggtttgatatgagaagagttcgggaaagagattatgatggagttaagggatagttgatgggaattatagggagagaatattaaaggaatgtagaatttaggggatagatttaagttatttgtttttatttgaggtatattttgaattattttttgtttaagttttgttttaagttaagaaaatagttgttttaatattatgataagttttaggggtatgtttttaatattttggtagaaagggtgaggagagaggtaaaattcgatggtttaatttttttagtgttaggagttattaattttttgggtttagattagtttttatttaggaatgttagtggtttttaaggtaaaggtttttatatttagagattgggttttgaatatatttttttttttttttatatattttatttatttatttatttatttatttatttatttatttatttatttatttttgagatggagttttagtttgttatttagggtggagtgtagtggtacgatttcggtttattgtaatttttattttttaggtttaagtgatttttttgttttagttttttaagtagttgggattcgtgtgttattatgtttagttaattttttttttttttgtatttttagtagagatggggttttattatgttggttagattggtttcgaatttttaattttagtgatttattcgttttagttttttaaagtgttggaattataggtgtgagttattacgttcggttatatttttatttatcgtttttgtttgtttgtttgtttgtttgtttgtttgagatggagttttgttttatagtttaggttggagtgtaatggtacgattttggtttattataatttgcgttgtttaggtttaagtgatttttttgttttagttttttaagtagttgggattataggtgtttgttataacgttcgattaattttttgtatttttagtagagacggggtttttttatgtttgttaggttggttttatatttttaatttggtgatttatttgtttcggttttttaaagtgttgggattataggcgtaagttatggcgttcggttttttatttatttttgtatatttttgtttgtttttttttttaggtatagacgttttttttttttgttataatggaggtttttgtgtcgatagcggttttttttatttttgttattgtttttttggattttaaggtagtttgtgttaggattacgtgaatttatgtgagtttaggttttgttagaacggggttatttgtatggtttagtttagtgggtatttttgttaggtgagagggtttgtaggagaagggggaggaaagataagggtgggttggatgggagagatagtagtgattgagggaagatttaatgtatttattttatttttttttattttttttaattttatatatttaattaattataaagttatgttattttattttttgaagtttttttaagtttgtgtttttatttttattttttgttttattgtttgagttttgatttttgttgcgttttagatagatatttgtattagttttttaattatagtttttgtttttatatttgtttttttataggtttagtttttatttcgtggttagggtattttattgaaaatgtttagttgatttgttttttttttgttgaattttcggaggttgttcgttttattttgaataaagtttaaggtttgtatgatttagttttgtttgttttttaggttttagttttttttattttatttttttattttttgttttagtaatatgaaattgttgttgattttgttacgtattttatattgatttttgttttttagtttttatttttgttattgatattatttggaatggtttttttaattttttttttataggttggtgtttaggaggtattttttttaggaagatgtttttaatttttttttaggttggattagggttttttttttgtggtttaggttattaagttaggagaggtaaagttggtatttaagtttaagtagtttgatttatatgtttagaattataatttttttgtgtgtgtggttgttattttatttttttttgttattgataaacggtagttatacgtatttatggggtatatgtgagttttttggtttttttttttttttttttttcgtttttggagatagagtcgttttattttttaggttgaagggtagtggtataattttggtttattgaaattttcgttttttaggtttaagtagtttttatgttttagtttttcgagtagttgggattataggaacgcgttattacgtttggttaatttttgtatttttagtagagatggggttttattatgttgggtaggttggttttagaatttttgatttaaagtgatttattcgtttagtttgttaaagtgataagattataggtatgagttatcgtatttggatatatgtgatattttgatatatgtatataatgtattatgattaaattagggtaattgggatatttattattttaaatattatttttttgtgttgagaatattttaaatttttttttttagttattttgaaatataaattgttaattattattatttttttttgttatttaatattagaatttattttttttatatgattataattttgtatttattaattaatttttttttatttttttttttttgttattttttttaatttttggtaattattattttattttatttttatgagattaatttttttagtttttatatatgagtgaggagtaatattatatatgtaataggaggttgatgtaagtatttatttggaatgtaagaaaggttaggattaattaaggtagtggtataaaggtgaaggtgagagatatgtaatatttgttttttcgtgtttggtttattttatttaatataatgttttttagttttatttatgttgttgaaaatgataggattttattttttttttggttgaataatattttattgtgtttatatgatatagttttttttttttatttatttgttgatggtattttagttaattttatatgttagttattgtgaatagtgttgtaataaatatggggatgtagatatttttttaagatattgattttttttggatatgtaatgaatagtagattgattatatggtagatttatttttaatttttgagaaatttttatatttttttttatattggttgtgttagtttatatttttattaatagtgtatgagggtttttttttttttgtatttttgttagtatttgttattttttgtattttttttttttttttgagatagagttttgttgtgttgtttaggttggattatagtgatttgattttagtttattgtaatttttgttttttagatttaagcgatttttgtattttagttttttaagtaattgggattataggcgtggattattatgtttggttaattttttgtatttttagtagagatggggttttattatgttggttaggatggtttcgaatttttgattttaaatgattttttcgttttaatttttgaaagtgttgggattataggtatgggttattatatttggtttttgtgtttttaataatagttattttaattggtgtgagatgatattttattgtggttttgatttatatttttttgatttgtatttatatatttgttggttatttgtatgtttttttttgagaaatgtttgtttagataatttgtttattttttaaattatattatttgtcggtggtggtagtggtggtgtttgttgttgagttttttatacgttttgattattaattttttgttagatagtttgtaaatatttttttttattttgtaggttgtttttttattttattaattgttttttttgttgtatagatattttttagtttgatgtaattatatttgtttgttgttgtttttgttgtttggttgttgaggttttatttaaaaaatttttgtttagattaatgttttgaagtattttttaaatgattttttttttttttttttttgagaaggagttttgtatcgtcgtttgggttggagtgtagtggcgtaaatttgatttattgtaatttttgttttttgggtttaagcgatttttttgttttagttttttaaatagttggaatttataggtgtttattattacgtttagttatttttttgtatttttagtagagacggggttttattatgttggttaggttggttttaaatttttgattttgtgtttgaggattataggtgtgatttatcgtgttcggttgaattttttttttagtggttttaagtttttagttgtatatgtaaggttttaatttattttgtatatgatgatagatagagatttagtttttttttttttttttttttggggggggggatagagttttgttttgttgttttgttgtttagtttggagtgtagtggtatgattttagtttattgtaatttttattttttaagtttaattgatttttttgttttagttttttgagtagttggaattataggtgtatattattacgttcggttaatttttgtaattttagtagagatggggttttattatattggttaggttggttttaaatttttgattttaggtgatttatttattttcgttttttaaagtgttgggattataggcgtgagttatttcgttcggtttaggtttagttttttttgtatatggatatttagtttttttagtataatttattgaagagagtgttttttttttagtgtgtgtatttggtgtttttgttgaaagtaagttggttggtcgggagtggtggtttatgtttgtaattttagtattttgggagatcgaggtgggtagattataaggttaggagttcgagattagtttgattaatatagtgaaattttcgtttttattaaaaatataaaaattagttaggtatggtggtgcgtatttgtaattttagttatttaggaggttgaggtaggagaatcgtttgaatttaggaggtggaggttgtagtgagttagatcgtgttattgtatttcggtttggtaatagagtaagattttattttaaaaaaaaaaaaaggaaagaaaagaaaaaagaaagtaagttggttgttaaatgtttggatttgtttttttgggttttttattatattttattggtttatgtgtttgttttttatgttagtattatgttgttttggttattatagttttatagtatatttttaagttaggtagtgtggtatttttagttttgttttttttgtttaggattgttttggttatttgggttttttatagtttagataaattttagggttgttttttttatttttgtaaagaatattattggtatttttataggggttgtatgattttgtagattattttggtaagtatagatattttagtagtatttatttttttaatttatgaatataggatatttttttatttttttgtgttttttttaatttattttattaatgttttatagttgttattgtagtatttttttatttttttggttaaatttatttatttgtttttattttttgtaattattataaatgggattgtttttttgatttttttttttgattgtttgttgttagcgtatagaaatgttattattttttttatattgattttgtattttatagttttattgaatttgtttataattagtgttttttttaggtttttttaaatataggattatgttatttgtgaatatggataatttgagttttttttttgtaatttggatgttttttattttttttttttgtttaattgttttggttaggatttttagtattattttgaataaaaatagtgaaagtgagtatttttgttttgttttagattttagaggaaaggtttttaatttttttttatttaatatgatgttagttgtgggtttgttatatatggtttttattattttgagatatagaattatagttttttttttttgagatagagttttgttttgttatttaggttggaatgtagtggtgtaattttagtttattgtaatttttatttttcgggtttaagtaatttatttgttttagtttttttagtagttgggattataggtgtttgttattatatttagttaattttgtgtatgtgtgtatttttagtagagatggggttttattatgttggttaggttggttttaaaattttgattttaagtgatttattcgttttgattttttaaattgttgggattataggcgtgagttatcgtgttcggttagaattataatttttgatagaaggtttaagatagatattttaatttattttttttttttatttttttattttattttttaattttttattatgaatatttttaaatataaataaaagtagtatattgattagtagtaaatttttgggtatttattatttagttttatttattttttttttttttttttttttttttttttgagatagtattttattttgttgtttcggttagagtatagtggcgcgatttcggtttattgtaattttcgtttttcgggtttaagcgatttttttgttttagttttttgagtagttgggattatagggatatgttattatgttcggttaatttttgtatttatagtagagatggagttttattatattggttaggttggtttcgaatttttgatttcgtgatttgtttattttagtttattaaagtgttgggattataggcgtgagttatcgtattcggttatttatttttttttttatgaagtttttttttttaaaatatttttattatttgttttttttagttttttgattattttttggattttttgtgaatttttttttttttttttgaagtttgtttttttggtattgtatttttgtatattttttttttttttgtaagaagttagtacgtggtatagattttgttaatgattttttttttattagttgagtggtatgaagaagtagaaaatggttaagagtattggtttggagttatagatttttattgatttttagttttgttatttatagttatttgatttgtataagttattaattttttagagatttagtttttttacgtgtaaagtaaaaatcgaatgagataatttaaataaaatgttattagggggatttttaggttatgtatataaattatgtaataaatgttagttattttttttttttggttgattgagagtttttaggaaataggaatgggttttaattttttttgtatttttagtgtttaaaacggtgtttgatataaagtaggtatttaatagatgtttatgaattaataaagtatgagagagtttggtaggtatttagtaggggaggaaggttttattaaaaatggtgttgtgtttggtggtagtgtgttatagagattgtttgggattggggaagtttgagttgtgtgtcgttaataattgtgttttatggggagttgagatagaaggattgtgatatatggttatgatggatggtgagttgagtgatgttgttgagttggaaggtgggggattggatagattattttgagttgggttttttgtagtgttgggttgggtttatttattggttttttgtttaattttttttgtttgtagtgtgttttaggttacgatggatagaattgtttaaaggaattcgatgtttgttagttttaattttgttataattatggaatttgtatttttaaatttggaggtttttattgtgtttgttttttaggttttgtggggttacgttgtgagggagacgtggacgagtgtttggattagttttgttattttataggtattgtagtttgttattttttggttaatgttttttattgttagtgtttgtttggatatataggtgaggttttaagataaggggtataagtgtgtttggagtatagttaagtagattatggagagttagatagtttttatttatgcggtagtcgttatttggtttattttttgtttttacgtttattttcgtttagaaaagatgttttaggatttttttatttgtatatttagtattgggttaatatttaggaatgagttaggatggaggtagtgattgatgtagtgtgtgatatttaattttttttataattataggttagtggtgtgaggtggagatagatttttgttatagttaattttgtttttatggagggatttgtgaggttatagtaggattatttttgggttttatttgttattgttttaaggtaagtgattataaatttgttttttttgttgttttttatgttgataaggtaagaatattttagttggaattttagaagggattgtgggtgagtattgatgtggaaattattggaaaaagttatgttaagtttatagtgggaagtgttttttagaagtagttaaaggtaaggtaggattagttgatagtatgaatggaatttttaaaaattataggcgttgtttaagggaaggttaggagttttttaagtttaagttgcgtggtgggtggttttagataggttattttaattttgtgtgtgtttgtatatgtatttatggattttagatgtatggaattagattaattttaagttttggtttttgatatattgatattggtttatgtttggtttttttttattttattattttaataatgtaatatttatgaatttaatttaagaattttaatattaataataatttatatttatttaagttttttttttgtattttgttttttttttagaggaagaggaagatatatgattttatttttaaggagtaagataataatataatagtcggtcgggtatagtggtttacgtttgtaattttagtattttgggaggtcgaggtaggcggattatttgaggtcgggtattcgagattagtttgataaatatggagaaattttgtttttattaaaaatataaattagttgggcgtggtggtgtatggttgtaattttagttattgggaaggttgaggtaggagaattgtttgaattcgggaggtagaggttgtaatgagttgagattgtattattgtattttagtttggataataagagcgaaattttgttttaaaaataataataataataatataatagtattttattaattgtttagttttttaggatttgtattgtaatgttatagtttattaggttgttgtatatagttgtgttttatttatttttaatagaatgtaatatgttattgtgtgaaattattataggatatggttttaatatttataaaatgattaatttgatgttttttgaggcgttttttagatatgagaatttaggattttttgtatcgttttaatttaagagtttgtttgatggagagcgggaagaataatgtaagttgtatttttaatatttttttttttttttatagggttttgaaggttttatttgtagttatagggtttttttttgcggtttttattattgttattacggaggtttgtgtttgtttttttttaagttaggttttttattacgttgtgtttgttttagtggttatgggggttttgattgtttgattttattagtttttaaaggttgtggttttttttttttatgtttatataatggtagttgtttagagattacgggtttggggggtttaggttttcgatgtttttgtttttatagttttttagggtttcggtgttagaaattcggagttaaggggtgtgagggtagaagtggagatggggtttgcgatgttggttgtagtggttcgggaggaaattgggatggaggggattgttttttgggagttttagatttttggaagggttgttttttttattttcggtgttggtttttttttcgggacgggtagtgttatttatagtgtgattttgaagagtgtttgtttgatggttacgattgtgagatttttttagtttgtacgtgagtttgaaatttattggagttagggaaggagaggggtgggtgagaggaggaggaaggacgtagatggttttgagttatagtgtggttatagttttgggttttagggagtttttattttaataattattattaaataggggtcgaagattttggattttaatttagggtaatggggtggtattagtatttaatgtggggcgtggtttttgggtttttttttaagagttgaaggaatttaggttttaagtttttttttttaagttttgttgttatggagtattttttttagtagttagtattttatagagggaaaagggtttgggatttttttttagaaatagaggagagtttgggagggtatagagaggggatagtttagggagataggggtgttagtagatattggggtgtttggattattatttaggatttgattaagtttattgttttatagttgtttttatttagtaattaaagttttagagggtataaaatatggggaattttttttagggtgaagaaaagagttaggttttagggaggttttgagtttttttttttttattttatagtttagtttatgattagtattgttatgattatttttataacgggtattgtgagaaaggttgtaatattgtagagtgtggttgggatggaggtgattgtaggtttgaagatggggatttagagtgggggttttttttggttttgttggtggtattgagttttttagttttagattagtagttgtttgttttggttcgggtgttgtttttgattttgagggtaggattttgggtaaggaaggatcgtgatggtagggatatggtgtatttttattttggggttcgggttgaagaaaagttaggaggaattcgggattttatttattaggagagagtagttttttaaatatagtttttgggtaaggagatcgatttttttagtgttgggtaagaagttaggtggagggaagggttagatattagtttttttaagagggtagagggaggaaagggagttagggattaatatagaggtttttgaggtgttttttttataggtttgtggtggttatgggtgtggatttgtttcgttgtggttttgattattcggtatttcgttgtttttgggattttgggtttttatttcgtttttttgttgcgatggttgtagtgggagttttggagtttttgttgtttggattattgttggttgtttatttttatgtagggatcggtaggtgattttttgttattttttttgatttttgtttttaggttagtttttatgttagtaataggtaatggaggttgaattaaataggatagttgagattgaaaatgttttttgtggggatttattttttttaatttcgttttttttaattgaattttttattggtttatttgttttatagtttttttttttatttttttaagtatattattttaatttttgttatagttttttaataaagggatggtttattttttttattagattgagaatatttaatagtttttgtattagataatttatagtatatgaaagaataataggttgggcgtagtggtttatgtttataattttagtacgttgggagattaaggtaggtggattacgaggttaggagattgagattattttggttaatgcggtgaaattttgtttttattaaaaataaaaaaattagtcggttgtggtggcgggtgtttgtagttttagttatttaggaggttgaggtaggagaatggcgtgaatttgggaggtggagtttgtagtgagtcgagatcgcgttattgtattttagtttgggcgatagagggagattttattttaaaaaaaaaaaaagaaaaataattgttatatcgtattttgtgttttattttaagtattttatattgttattttatttaatttttttttataattttatgaggtacgtattgttggttgagtattttttatttgaaatgtttgggaataaaagtgttttagatttcggatttattttggaatatttgtattatatttattggtttagtatttttaatataatatttaaatgttataatgagtattttttttgagcgttatgttggtattttaaaagttttagattttggaatattttagatttgggattggggttatggatatttagtttttttttgtgtgtttgttttttgagatagttttattttgttagttatattggagtatagtgacgttattttagtttattgtaatttttgttttttgggtttaagtaatttttttgttttagattattgagtagttggaattataatggtatgttattatgttttgataattttttttgtttttgttttgttttgttttgtttgagatagagttttgttttgtcgtttaggtcggagtgtagtggcgcgatttcggtttattgtaagttttattttttaagtttacgttatttttttgttttagttttttaagtagttgggattataggtgttcgttattatatttggttaattttttgtatttttagtagagatagggttttattatgttagttaggatggtttcgattttttgattttatgatttatttgttttagttttttaaagtgttgagattataggagtaagttattatatttagttattaatttttatatttttagtagagagggggttttgttatgttggttaggttggtttcgaatttttggttttatatgatttatttgttttagttttttaaagtgttgggattataggtatgagttattgtgtttaattttaatttatattattatttttattttgtagataaggaaatcgaggtaaagataggttattaaatttgtttaaaggttttttaatagtaattagttttattaggagtggtttttttttgtgattttgttttttttattagtattttttgttaattagtttttttggtttgtgttgtgttttttagtggtcggggtgatttttttggttttaggggtttttttcgttttttagtttattcggcgtcgacgtcgagagtatggagttttttggttgttttttggttttattcgacggtttcggatttagttagttttttatcgacgtcggtttttattaggcgaggatagtattggttttaagtgagaatgaggagaaatttaggtttaggaaggggagttttttttatggcgatatttataattagaaaagataagaaatattattgtagaagttaaagataggggaaggagagaggggtgggaagtttgttggaaattttggagattttgatggttataatttcgtgtaatttttatttatttatttttttttagggtattgaagttaaaggtagaagttgatgaggatggagttgtgatgtgtttaggttttgaggagggagaggaggtgggttaggtgaaagggttggggtaagaatggtttggaggtgatggaagggatgaaagggtaaattaatttttattgatttttgttgttatttaaaggttgaagaaataggtttattttttacgtgttagttttggtttttgagtggtggttgtggggcgtttttttaggtagttatgttaatttttttttaggaatttgagatggaagtttttgatttggatattcgtggatttggtatgtgagttaatttagattaagaaaaaaaaaaaaagttttttgattttattagaattagagagttttttaatattagaattagaggaaataattttagattgagtgttttagaataatgatttttaaagtgtggtttttagatagtaaaattagtattatttgggaatttgttagaaatgtaaattattgggttttattatagagttattgatttaggaatttaaaatgttaggtaatttgttttaataagttttttaggtgaatttgatttagattcgtttgagaaaattattgttaggtcgggcgtggtggtttacgtttgtaattttagtattttgggaggttaaggcgggtggattataaggttaggagatcgagattattttggttaatatagtgaaatttcgtttttattaaaaatataaaaaattagtcgggcgtggtggcgggagtttgtagttttagttgttttggaggttaaggtaggagaatggcgtgaatttgggaggaggagtttgtagtgagtcgagatcgcgttattgtattttagtttgggtgatagggcgagatttcgttttagaaaaaaaaaaaaaaaaaagagaaaattattgttttggaatgttagagaattaagttgtaggttttttttatagaggaagaaattgaagttagagaaaagtagaaaagttatttggttaaagttatatagagttagaatttagttttttaatattttaggttttgattttttttgagtttatatgttgtttttttttttttgttgtgttttttagattgatttattattttgttttattaatagatggggtgatatttttgatgttagtagtttgttgtggggaagtatagttcgggattttttaaggggtatggttgggatgttttgagttttgggaatttttgttggatggaggggtttgtttttaggtttatatcgtgggtattggggagatttttttgtatttggttgttcgattttttcggttaatcgttgttcgtcgtttttttgaggttggagttaattttaattagttagatcgggtagggcgtatatttttttatgttgttgtggttgttgatgttcgggaggtttgttaggttagtatatattgaggtttttatagggaatggggcgagtttataagtaaagttggatagaagtattttttagagtttgataaggaggaaattggtgtgattgggaatttgatagggaaattgcggaggatggttgaatatggattgcgagtggggttaatagtgtaaggaattcgagttggtagtttaaggtattttaggggttattggttttttgtttttttagtttttgtttcgtagtagataaattgtagtggacgttcgtatagaggacgggattatatttttgatgttggttgttaggttggcggtggaagatttggttgaagaattgattgtagtttaagtagacgtgggggttagagataaatggggtatgtagaggaaggggtgatgtatgttatagagaagttgagtagatggggtgggagatagcgtgtaaaatataggtgtagtagaggggtatttttttttattttgttgttacggcggttaatttgagatgcggtggaagtacgggtcgcgtgagtttttttttttaatttttatttttaatattatattggtttttcgttttagtttattggggaattggtatggaatatagtgtttgtggaaaggggggggaatttcgtggggggagattgtttttcggttttatcgattttagaataatgttttattgtttttttcgcgtattggtgacgttattagggtaatattttttgtaggtcggtggttttttgggtaacgtttttcgtttttgagggattagtcggttcgaatagttttttttttaaggttagaattcgtgggaaatcggaatttaggcgtttggtttttaattggggtaataattttttacgtcgttttttagggaaaattgcgttgtattgggttgttgtcgtgaataacgttcgagtcgttcgttcgtttttttaggtcggagtcgataaagatgtttaggataatagggttagatgggatagagggttttttataaaatagttaggcgtacgagagatggaaagtgcggtaattcgtaaagtttgaagggataggggttagtggtcgcgtaagtgaaggtagaaaggtttagttttgtgggcgtggttttttttgatatcggttttggtttttttgtataggagtagacgtcgttatttttggcggcgcgggaaggagcggtggaagtagtttagttattgttggggttgggggtagttcgagagttgcgggattaggttgggttagcgtcggcggacgtcgtttattaacgtaattattgggatttgttgacgttgttggaaggggttgggttattagaggttcgttataaagttacgtcgggtcgcgaggttgggtttttttcgcgcgtacggacggtgttagtaagcgtgttttcgtatgggggcggggttttgtcgcgttgtcggacgttgttagtcggagtaggttttcgtgggggcggagtttgtttgtaggttcggatttggttcgtagatttggttgcgcgggggggcggggtttatttttattgtcggagtttttcgggagtaggagtaggaggaggttcgatttttcgcggtcgtaggttttttgtaggtatgcgcgggtttcggtttaattttgcgataatgcgaggaagatacggagtggttgtcgggcgcggaggtagggttttaacggatgattggttttgtgattgggtggttttgggagtttgcggttttgtttttaatatttcgatttcgtttttttgttttatttcgttttcggagcggggattattttaatttgattgtggttttttagttttttaagaaatgtttataaattaaggaggagagggtaaaaaatagaagaatatatggtagggaggaattttaaaaatgattatttattaaaaggtaggttggaaggtttttttggttttaagatggattttttaaaatgaagggttgtgagtttagttttttttttaaaatgaatgtatgtttattagagtagatattttttacgtggagaagttgtagttttggaaagagggtttaagatgttaggatgaggtaggtttagtttttttttagaaaataagataggttataggagggtagagtggagtggaaatatttttaagttggaattaagaattgtaggtatatgggatgtaagatgtttttttttatatatggtttttaaagggtgtttttatgatttattgtttttattgtttataaatggttgataaatatttattgggtatttattatgtgttaggtattgtgtaggtgttgaaaagtggttaagggttattttcgttgatgattttttgtattttttttttttataataaagaattttattgtggggatgaagcgttttttttagttattgttatcgttatttaagaattttaaatttgttatttataataaagttgatttgaagtgttatttttttttggaggaattggggagaagaatgggaaaaaagatgggagtgattgtataatgttagtattttgtgtttttggtttagtatttggattggatggaggatgtaagtatagtttaaaagtaagaataagtatatttaggggttttatgataatttagggtattatttgaaagtaagaatttagtagttaagggagaaatcgtatatattaggttaggggtttttaatttttgggttatagattggtattggtttatggttttttaggaattgggttatatagtaggaggtgagtaagtattattgtttaagttttattttttgttagattagtataagtattaaatttttataggaattcgaattttattgtgaattgtgtatgtaagggatttaagtttttcgttttttacgggaatttaatgtttaatgatttggggtggaatagttttattttgaaattagtttttcgtcgttatcgattatggaataattgttttttacgaaatttttttttggtgttaaaaaggtaggagattattgtattagatgatgtatatattttgttttttattttagggtttttatttatggttatttaggagatttttaaggttataagttaagtagatggagagagtattttgaaattttgtttattttgtagtaatatgttgttaggtttgaaatatggagttatgaggtattttgaaagttaataatatttatagtttattaagtatttattatgtattaagtgttttattatattattaatatattaattttatgaagtaggtgttattaaaattttattttatttagaaattgaggtatagagatttgtttaagattgtaaggaataagcggtaggattagatttttttattatattttatattttaaattatttagttataaattttttaatatgataggttgttatttagaggtattaaatggttgtttgttttgttttttttttgatgttaattagtttgattagtattgattaaagattaagttagagaggtagttttttttttttttaattttattttatttttttttttttttgaaatagggtattgttttgttgtttagtttggagtgtagtggtataaatggtttattgtagttataattttttgggtttaagtaatttttttattttagttttttatttttttatatttatattttttatgtttaaaataaatttttttttgttttttgtttgtattaaattgtaagtttttaaaatgaatttttttcgtattttatttggtatatattttgttttttgaatagagtgtattttttattttattttattttggagacggagtttcgttttgttatttaggttggagcgtagtggtataattttagtttatcgtaattttcgtttttcgggtttaagtaatttttttgttttaattttttgagtagttgggattataggcgtatgtggttacgtttagttaattttttgtattttagtaaagatggggttttattatgttttttaggttggtttttaatttttgagtttaggtaatttattcgttttagttttttaaagtgttaggattataggtgtgagttatcgtagtcggttattttttgaatagattttaaatatttagaggttagggatgattatttaatatatatatattgaatatttattatgtgttggattcggtgttagggttttatgtatatatttgagagttttatatttttggatttgaattttttattttttattggaattatgttttttttagtttcggtaagtaagagggaagatcgggagggttaaattttatattagggtttattttagggagggaagggatttggttggggggagggggattttgaggagtgaaattattttttgtgtagttagtttttgtgttgatagaaagagtagaagaggaggtggggtggagggagtagagttagggattaggggattattgaggttttggagatgagatcgttaggagtttttttttattatgagttttttttatttttgtagttggaggagttttttttagttttagtgttgttttggggcgagagagattgaataagttgtttgggtgggaagagaatggaggaagttgatagggatgggcggggttcgtgggggggttgattaggaatttagttttttgtttagtatttaggtatttagtttttagtttatttttattttttttagtttttattttttttaggaatttaaggttttagttttttttttaaattttagttattttttttttattagttttttttttttaggggatggaggttgagagattttaggaagaagaggatggtgagtaggtgagttgggtacggggttggggaggttgatattgggaaagaagggaggtgagaggatttggggtagaaatgtagggatataggggttttgaaaggtttgggtaaattgaggtaggaatagagatatatagagaggaaacgggttattggtttagttttttgtttatttttttcgttttaattattattgtttgattagaatggatatattttggtattagggttttttttaggatgaggaaggttggttttttttaaattttattattcggttttggcgatttgtttttttattttttttttttttagggattcgttatataggtatttttatttatttagggagagtttcgattttagtgtttatattttgattttattattaaggtttattttattgtgggttttttttttattttttttagattttttttgggattttttattgtatttttttttttttgatttaaagtttttaattacgttattttgtttatatttttttacggtttttgtttgttaatttttttgggtttttgagttttttatatttttttttttagttttgggatttcgttcggtttttttgttttttttgtagattgaattttttttggatttggtggttgaagtttagtttcgtcgtttggaggagtagagggttattttttatattttttaaaattttttaagtttagtttttgttttatttcgttttttcgaggatagagaatagttttatagtattatttttagttattaggtaagatatttttttaggaggtaaatttaggttttttggttttttggtttttgttttttttggggttttatttttgtttttttttaggtattttatcgtttttataggttttttatatgtttttttatattaatttttgatttttttaagaattttttttttttagatttttattaaagttttttttttttttttatttttttagtgttagcggatggaagtttagcggttagagttttttttttttttaggggggtaagagtttttggagttgttgttgagagtttagggtgggggtcgaatggaggagtaaaggtttcggttttttatatatatttgttgagatttgagttttaattagtttttttttgttattggttttaaagttgggtagtttattgtatgtttttaatttttgtttggtaggggtattagagattgaaagatacggtataaattttaatatttattttttatattattttttttgggaattggatagggtgaaagtttttaaattttgggaataggcgagatggaatagggatttaatttttcgtttataggtttatgggagtttgaggtagtaagggggattttaggtatttattttaaggagtggttgggagttttttttttaatttgtggggatattattagttgttaagttattaggtagtagggtttgagggtttaggtttttatttgagaggttataatttgagagatagttttatttttttttttagtaagaagggaaggtgggtgggtatttgagagattaagattatttttttagttttattattagtattttcgatttttgagattgaggggtttacgggttgtgaatggatttttagttttgtttattttttttttttattgttgttgagtttgtttgatgttttggttgtgtgaataaatataatttttttttggattgtagattggtatttggggggtttaggcggggtgaaaggtaggaaggtgaggttagaggttttttttttttttagtttggttagaggttagttttttttttcggttggttaattattggtttattaagtagcggttggagatttttttaattattttttttagttttttttttcggttttaattaagtagaatagggaggggagttattagaataagaaatacgaattgagttgtcggtgaatttaggtattttagcggtttgagtttatatcgtttagatttttgatttaggatttaggtgatagacgtttttagtcgttaatatagttttatttttaggtcgcggaagtttagttagggggtttttttatattttttagatggttcgttttttttttttatttttttttttttttttttttttttattaggttttagtttttttgtttttgtgttttttttttcgtttttagtttttttttgttttttttttttttttttttttttttttttttcggttttttttttttagtttttttttttcgtttttttttttttttttttttttttttttttttttttttatatatattttcgtttgggtttttttttttttttcggttttatttttttcgtcgtcgggggtcggggttttttgtggggggtttagtcggtattttaggtttttttttagtgtcggggtgaattttcgggggagtcgggagtcgggggtagacgggcgggggttggggcggagggagtagcggttttagcgagtttggggggagaagtaattaggcggggggaggggcggagtagggagggggttttagggtttttttttagttatggacgaacggttattggggtcgttttttttaggcgggggtcgggggggtttgggattggtgagtggggagtttgggggttttggcgagtttttcggtggcggagatttcggtgggggtagcgggggggtttcgggaggtcgagggaagtaagatatcggggatattttgtagtagataatgattattatcgattagagtttggacgaggtttaggttaagtgagtgtttttatttcgggattttatatagatttagtaaatttcgtttatatgttttgaattttttgggagttttttttaattttagggttttttttaggatttaatagtttttttttttttttatttttgggagtttatagaaaagtgattttttttaaatttttttttatttttaggttttgaaatttttatagagggaattttcggtggttcggttttttatttttaattttttgtcgatttttgtagttttttggaatagttttattttcgggagttttttttggtttttagattaagaaattgtttttgggttacgttatttttttttttaattttttatttagtttttttattttttttagatgtggagatttttatattttttttagagtttttaaagtttttttttattgtttagttagatattaggtgtattaaagttttttatttgtttagttttaggatttttttatatattttatattgatttttttagttagttcggtatttttagttttattttgttattttaaattttgattttttttaattttagtttttgtttttttttttttgaaatttattaagttatttttttttttttatttatttttagatttttttttttatttttttagattattttttaaagttcgtagtttttaatttgttgtttgtattttttttgtgtttttttgaagttgaggagtttttttatgttttgggagttgatttttttttaagaattttttattttatttttaatttattttatttttaattcgtttttttttttcgtagattgatttttttttttttttgtttttaggttttttgttttgtttttttagttttttaatttttttttttttttatttttattttttttaaggaaatacgttttaaattgttatcgaatgaagtttgttttttttagcgttttgtgtgaaattaaggagaaaattggtatgtgggtttttttcggattgtttaattttgggaatagaattttgtttattatagggttagagtgtgataatttggggttttgaggaaagtaaggagttagggggattggggaaggaattaaagtttgggaatttggttttttaggaagtattaggaggattgagtattgggtattggggtttttgggtttttaagtttattcgtttgtatgttaggttttagtattcggagtttttaggaggaggagtcggtggatttatagttgatgcgtttggataatatgtttttggtagagggtgtggttgggttcgagaaagggggcggtttagtagtagtagttgtagtcgttgtagtttttggtggtggtgtgttttttgataattttatcgaatattcggattatcgtagtaaatttgtttagattcgttatatatattattcggagttggagaagtatgagtaggtaaggagaggaggtttgggtgggtggagggaagggtttttgtaggggaattttatggttaaagggtttttttttattagtttattggtttttattataggtatgtaatgagtttacgatttatgttatgaatttgttgagggagtagagtcgtattaggttcgtggtttttaaagagatggaacgtatggtgagtattatttatcgaaagtttagcgttatttagatgtagttgaagtagagtatttgcgaggttgtgatgattttgcgttttcgttttttggatgttaggtgggtttagggattttaggttggtttttagtattgggtttttttttatttttttttaagattttgagttgttatgttgtataatatggtattttatgataatggtgattttggggttatgttatgtgatagttttgttaggatattaatattttttttatcgttttttttttttttttgtagacgaaagcgtcgtaattttagtaaataggttattgaggttttaaatgagtatttttatttttatttgagtaatttatattttagtgaggaggttaaggaggagtttgttaagaagtgtggtattatcgtgttttaggtattatggaggttgcgggaggagttgttaggtaaagtgtacgtattttagttaggtgtagtggtgtgtttttgtaattttagttattagggaggttgaagtgggaggattatttgaattggagattagtttgggtaatagtatagtgagattaggaagtaaaaaaaaaaaaaatgttgttatttatattttatttagtgaaggattttagaggtaaatgtttttatttgatttttttttttgttttataggtttttaattggtttggtaataagaggattcgttataagaaaaatatcggaaagttttaagaggaggtaaatatttatgttgttaagatcgtcgtgttagttatttaggggggttatagtcgtattagtttttcgatattttttttttttgtaggtggattttattgttattttagttgattgttttgtatattttttgtttttgtttttattttttatttaggtaggattatagtagagagggggttttttggggtgagagggatcgagttgagataggttggagatgttaggggatagaggttattttagtgattttagttttgtttttttttttacgggtggttaaggaatagtttgttttttttgtgtgttggaatgttattttgtggataattggagtatagtagtatgtttttataagagttgagagttgtggtttattttttattattacgggttttattatatttttttttttttgtttttataaggttttggcggtttttttaattttttaggatttggagatatgtttttggggatgtttgggtttaacggagatttttattttgttttttaggttagatgtttattttttttcgaatagggttttttttaattttattttttttattttaggatataagattttttttttttgaggtttttttttattgttatatttttttttgttgtttgtaggtggaattatttcgatattcgatggggttagggggttatggggataatttcgggggaggttagatgtatagtttacgggaaatgagggtgagtggattttgaagtttttttttgtttagtttttataggatagaggggtattttttttagtaatgttgtgtttatatagggtttttagggttttttttgttttttgtattttgtttttttttttaggtaaatggtagttggtaagaggttgtgattttttttttagtgatatttttaacggagggattagggagtgtttattttgatatttttaattgattttgttttttagggttataggggtgggggtttttataaggcgatttgaagaggacgtaggtttttagaggataaattttaatataggagaagtataagatagagaagggttaatggggttattttttttttaacgagattttttgtgttgggggtgttaattatatggtaggaagaatggggtttttaaggggagtgtggggtttgttttttttttttttttattttttttttttttcgtttttttttttatatagaaatatatatatatcgagaaatttattttttagattttttttttttttttgttttttttttttttttttttatattttatatatatatatttttatttgtaattattttgttttttttttgggtttttttatttttttttttttattttatttgtatgttttggaatttgtggagacgttagttttgtttaattagagatgttaaaaatggggatatgatttttggatagaggatatgggttacgtttttatgtatttttattttcgttttttcggacggtttatttattttatacgtagtttattttaaattaatagaatcgttcggtggacgagagtgtttgatttagatatttatttcggagggagtttttgttattttagggaattattgattgggttttggggttgaatttttttttttttaaagaaagaaaaagaaattttgggatttatttgttttttttgttgttgttgttgtttttgttgttgttggtggtggtggtggtggtggtttttaatttttaatttagtttggggaagtagtttgtttttttttttataaatatgttgattttttgttttttttttttattttttatttttttatattaggggtgatagttaaaggggttttggtaagagaaagggggataaatagaattggtaaagaggtttttttggttttaggtttgtttattaggaagtaaattttatagggtattaagttttgttttttaaaattttttaggtgttttttgtttatgtaggtaggtttttgtcgtatttgatgtggaggtagtgaagggtttgttttgttggttttttattttttttttttttataatttttgggtagggttggatttagtaattttgaggaaattgaagatgttatttttttttgtgagtgatatgtttttaattttttaaaaaattattatttgaaaattggagggggaagaatgggaagggagttattgttaaatatgttaaatatgggttggggtgtttgtatatgtattttttttaatttttttataaatgaggtatttttttgttatattaaaattaaggggtagggagagggaggaggttgtaaaaagttagatgtgggggaaaagtaatattaatattgttttatttttagttttgaattagttattatttgatttttttagatatttttaggattttataagattgttagagtggggaattttttttattaaagattcgggtaggattggggataggttggaagtgtgatgggtgggggggtgggaggtatgggtcgggggtagttttttttttatttgtaaatttgtgtagttttatagaaaaaaaataaaatgtagttttaaataaagaaattttttttttttttgggtttagttgagaattttttttaaaaaatatgagaaattttagaaaaaaaatgatttttttttacgaagttttaaataggttttttttttgttttttagttttgtttttatgatgtaggtttaattgtatttttgtagataatagtttggtttgaattttattgatgtaattttgcgtaattaagatggggttttagtgggttattaggtagttttgatggattgatggaataaataggatcgggggttttgagggaatgagattttagagggtatattttttattttttagggaagtgattgtatttagaggttggtagtatttaggggtggggtgataattatttttttagtatttgaaggatttttgttttaaaggtatgaatttttagtattttttgtgataagacgattgaaagatgggggttggagagagggtgtaggttttatttagggcggaggttatagtagggagaggggtagatagagttaggattttggaaggaagtaggatggtagtcggaatagtagttggagtttgggtgttggtttttagtttgtggggtgagttatttttttaattttattgattttttttgtagaaagtattttaattttatattttagtcgttttagaattttttttagaattcgaggaagtgttttttaaggttttttatttattttgtttaaattttgttagtttttattttttttttatttttttattatggtgttattttttaggggtagtagtaggtgtttaaaatattatagttcggattggcgagttattggtgttgaagtgtaagggggtttttaagaaattattttagcggttggaatggaaattggtaagcggggtttttgttgtagttttttaatttttagggagattagtaatgatttggattttcgttattttgttttatagtttttttttaaaggttttgtattgtttaggttttgtttttttgtttttagaatataggtcggatagaagtttggaaggttttgtttttttagggaggaggtttttgggatagtgtggttcgtgttttttttaacggttttttttttttttcggttgtcgggatttaggatgaggggatttttcggtgttaggtaatgaataggaatggaaaggagattaagtttaattatcgagttcgtgtttatcgtaagaattttagggttttttttaaggttttttttttatttaagaaaaagtttttaattttagttttggtttatgagggtttttgatttttattggttttatttttatatatagagtttgagaatttttataattatagtttttgattggatttttttttttttagagatttttgggaagttagaaattgtagattttgtttttgaatttacggttggtgtttttaataaggtagtggaagaaagtaggagaagtagaaaacggttttgtgaataggaggcgagtgtgtgtgggtgtgggtgtgtggtattttttatttttaaaggattttgaggttattattttttttttaggtggggatatgtgtgttagagggaagttattttgtagggatttttagttggtatttggatgggaagtttttggtgtttaatgagaagggtgagttttaaggtgttttttaagttgttttttttttgattttatttttatatttattttgggataatttgttttatttttttattataggagtatttgtgaaggaatagattaggagatattttgagatagggttttttatattgtagtcggagttaatggtgattttagttcggggaggagattttcgttttatttttttttgtagttttagtttaggtttttttcgatatcgggttttgcgtatagtttttatttagtttcgtgtttggggtgagtataggtggggagggttttaagtttacgtgagtacgttttggaagtttgatttttagggaaagagggagttaagtttatggttattgggattatttataagtgtaattttttattttaaaatttttttaatttttagagtttgtgtttttggaggaggtttaattggtggtggagttagaaggtggagtagtagtttttggtggaatcgtaattttgatttgtgaagtttttgtttagttttttttttaaatttattggatgaaggatgtgagtgatttggagagaggggttgggaggtagggtgaattataattagtaatagggagggtagagggttaacgagggaaaggtaggttaggagttgaggaggaagagagggtatttgaagatatggagataaaaagataagggttttgaaatagtttttttttttttttttttattagggtgtgtttttgttttttttttttagttttgtgttgattttttttgagatagggttttaggattagggaatttatagttgtgtggttatttattttagttacgggttttaggaaagtcgtgttgttagtattagtattatcggtgagatttttttttaagttttatagattttgggattagggtgtaggatagtataggttttaattttttgttttattttggttttatttttaatagttattttatttttttttttatgtatttatatttaagttttttttattttatttaaattttgttaagagagtagttaagtttttttttttttttttttgagttaaaaaaaggaatagacggttgggcgcggtggtttacgtttgtaattttaatattttgggaggttgaggcgggtagattatttgaggtagggagttcgagattagtttgattaatatggagaaattttatttttattaaaaatataaaattagttaggtatggtggtatatgtttgtaattttagttatttgggaggttagttatttgagaggttgaggtaggagaattgtttgaatttaggaggtatagattgcgatgagttaagatcgtattattgtatgttagtttgggtaataaaagtgaaattttattttaaaaaaaaaaagaaagggaaagattttattggggtttttattaaataatttttttttaattcgaagtttttttttttgattggatttaattttgttttttagaattaggcgaggaggggttaattgtaggtgaggggtttgataaagttagggaagtagaagatagtttttaatatatgtgattggggggatggttaataagaaaggaatggtgagtggtggtggttgtgtttttaattttttttgttttcgtataggttttgtgggaggattagggttgggaattttagttttggttttggggattttgggaggtttggggatagtcgttttgtttattggggttattttgtggtaaaggcggtaacgtcgaggagaggagaggtgagtggagaaagttagattttttagatttagggtttttaggtagtaagcgaagaggggtcggggggtggaacgataacgtgtcgtattttttttaatttttttttttaggaaggttttagaaaattaggaggaagaggaggagcgtgtagaattgaattagtcggaggaatttgaggtaggcgagagtagtattggagggttttgaggggtttatagatagattttatttattagttttttttttttttttttttgaattgttttggttttagattaatttttttttgtataattttttttttgtataattttattttgttaagtttttttttataattagagttttttataatgatgattaaatatttgatatattttgtttttgtgtgtttgtgtgtgtgtatgagatataattttatttttatatttttgagggttttgaaggaaagggatttatttttatattttattatattatattaaatatttatttaagttggggagaagatgtttttgtcgggggtgggggcgaatttgggaagagattttattaatatattttattttttttattgaatttgtattaaaggaggtagtgagggggcggaagtatttaagagttagaatttatattagattttggggagtgaaaaattaaattaaattagtaagatggggagtgggggaagagttagagggaattttgtttatttttgaagattaaattaagaaattagggaaagtaaagatttaggagaggagaaagatatttttttaatttattttttttttttagggtagagaattaaataacgttattgagtgagtttttgagtagaaggtttttttatttatgtatagattttattttttttttttaggtttttttggataatgtttagggttggttttagttaatagaaatagaggggttaagggggtttaggagtacggaagggttagtagggatttttaatattgatttttttttggttggaggtgggtaggaagtagatatagtttaaatattgagtagttaaaaaaagaagaagatggcgagaaataggaagagggaattttgttagttggaggttgggtgattttgttttagatttatatttgtgggagagaggaaagttgtggaagtatatgtttttaggttgggagggggtttgaggggatttatagggttttttgatgggagttgagtgtgatttttatttgtatttcggcggaaaggtttatgggtattgaagacggtggtgaaaaagttaaagggaaaagtattaatattaaatgagaagtggaagttttcggtattattaaatggttggaatttttagggaggtagaaaaagttagacgggaagtcggtaaatttgttaaggaagggatataattggataagaagatttatttttttgtttttcggagttggtttttggttttgggggcggggtggagtttttaatttgaggaagtggagagagaaagttaatagggatttttttttttttattttttatatcgttttttaagggtagaagtttttaattttttttaagtaatatttttagttttttatttgggattttggggtttttggttttttcgtttataaagcgggataattttttttttgttgattttagttttatatattggatatttttgtcgttttggtcgtgtttttagttattggggagaaaaaaggtggtttttagtatataagagggttttatagttttttagatttttttatttttttttttattttttgagtacgtatttgatgaagatatggttaattggatgggggagaaaaaaaaaaaaaggttaaattagttatagaaaagagagatatagattttagatttcgtagaattttatttaatttttttttttaagtaatttgttgttgttttttagattttttgtaatttttattatgttagttaatttagttagtttttttgtttgtttgattttttaatatttaaagttttgtttatttttaatatatttaattttttttttttttttttttttaataaatatatataaattttcgtgtttttttttttttgttttttaagttaatttttaattttttttagttatttttttttgggttttttttttttaattttaattttattattttaaattaaatttttttattagtatatttttttattatttatttttaagtttaataatgtttttatttttatgattttttaattttttaagtttgtttttttatagtgtttttatattagtttttttttagattttatttgaatgtgatttatattttttggtttttttcgatttaattgatgcgtgttttttttaatttttgtgttttatttgtttttatttgtatagttaagattttttatttttttggggtaaggtggttcgggttttatattgttttgttatttttcgttttattttttttttttagtatattacgtgttttagtttttggtttttaagatttttttttttatagatttcgatcgttatatttttatttatatatattagtaaagttttatgttttttgtcgggttttatttatgggaacgtgtttttcgattatttgtatgattgtatgattattcgtttttagtttttttagtatataagcgagatttattatttttcgttttttttttcgatttttattagtataggtggttatatatattgattatagtttttcgagtagtttttaaatatatattatattcgaaggtcgcgttcgtttcgtttcgttcgcgatttggtttttcggggttttcgtttttttttttcgttgttgttatggtcggttttgtttcgttttacgtattttttagtttttttaaatatatatatatacgttttaataaattagaaattattttttgtttacgatcgttgggtaggttttaaggttttttaattattattggtttgaatgtttgttagttataaagaatttaaaagaaaggattggtttaaagggtaggggcgggaaaaggttagtgtagttttgttttcgtataatggttattggttgatacggtttaagttaatgtgtaatgttaagggattggtaataattcgttatacgttgtcgtttggttaaggagggttttattcgtttgagtagttgttagttataattaaagttataagtaatttgttcgggattatttatagatttcgtttattataagtttttttttttttttcgtttttttttttagagaatgttcggattgttattggattttggagcgtatggttttaaattaatttattggttaaaatttgacggaaaatggtggttaggtaaaacgcgtttgcgtagtacgcggcgggacgggggtgggttaattttgtgagggtttaatttttttttgttttatttttttatttttattttgtcgttatggtgattgttttataattggcgaggtttgtattttaaagttttaggttcgttttattcgggttttttagttgtggattttttgttgattgggtttttttttttttttttgattggtcgatatcgggaaagacggcgaagagttaggaaaagagggaaaatattagggtcgtagggtttaaaatggttttaattttttttggtgacgtagagagtagaatttgggtttgttttttttttttagttaagggagtagaattgggattagttcgacgtttggatagtgggaatatcgatttgcggcgttggtgttaatttaatttattcggttggacgatttagttttttttatattaggtgatttatagagtaaaattgaattaaaggtttattttttttttaatgttgtatatagagtagaataggattgattttaatttcgttttaaatttttagagtaggaaagttttgggtttaatttttttgtgagtggtgtaaaagggataaagttcgttttttttaaggagattcgcggaggttagattcgtttttttttttttataatttgtttattagaaatagggttttttttttaggttggatttcggggagtttgggttttttttataattattgatttttattgtgattaaaggagtagaattaggtaatagtttttttattattaatttttttttcgagggtatgtaaattaatgtagggtaaaggtgtggttagaggggggattttgataaaagattttatgtgatttaagagtaaggaaagatgagaagttagtagttgcgtaaagaaggattggggtagatgaggatttaggaagtttgaggtttaggaaggaagatattgagagggaaaggtggaaatgaaggagagtgaagtgatggaatgattttagtaaagggataatgggagtggaggaagagaagagggggtggaaaattagatatatggttattaaattaaggaggtacgcgtattttagaggaatcggtatttttttttattttttatttttttagaaagtatttttgaagttaaatttttattggaagaaaagatgtatttatattgtatgttgtgagaaggggttgttttagtttgggtaagtaaggagattgatacgaaggaagtaggaaagaaaaggtatagaggtaaaagagtatggaaaaggaaagggttagggataaggttaaagagattttttttttttaaaggttagagaaggtaggtggaggggggagttggattgttgggagatagtgagggataaagggtaaaggaaattagattagaggattggagagtgagatggagtgagatggagttttggagagaaaaagaagagaggtgaatttaatgtttgttatatggtaggtagatgtttgataaatgtttagaattgaatgggtacgggaaaaggggtttttaagaatagttggggggaataagtagtagataatcggagttgagaaaaaaagagattaagtaaaagtggtagttaaaagagagttgatggagaataaaggaaggaatgtgcggaaggaggaatatagtattaggggatttagagttgaaagggagttagagaaaaaaaagatgtagttggagttagagatgggggtaaagatcgagggagagttttgggtcggggttcgtaagaggatattggtagatgtggggaggagatgttagagtttttgggagacgattggtaaaataggttgtttattatcgttttttattttttggtcggtttcggaaattagtaggcgttggggaggggtggcgggggaatagcggcggtagtagttttagtttttagagagatagtagaaagggagggagggagggtgttggggggatagttttttattatttttatcgttatgggtttaattttttatttttattttttttttatcggtcggggttaggatatttttaaatttcgtcgtttttttggtatcgatatttcgatagagatagagatatagttattcgttattatcgttgtcgtagtttggttggggagggggttagttttttaggttttttatttttttgaggtgtgggcgggaaagggatgggaggaggagggaagagggtgttgaaagcgattaggatgaggggaaggggagagattgggtttgggagggtcgattgggggagagggttgttggggaaaggagaggggtcgattgggaagagggttgttggggataggagaggggatttgagagggaggaaggatggaagagatttgggagggaggagaaatggaaatttttgtgaatttgggattgggagcgtgtatagggaattttggagagggaattttttatattttttttaatttttttttttgttttttgattttatatgatttttgaagggttatgaggggagaaggttagtagaatttgttttttaggaatatttttaggtgtttttgtttttatttaggtataggattttttgttttttagtggttttttatattgttagatttttattgatatataaatgttttatgggagttatgttttttatattgagtttgtgtgtttttgatatgtttaatggtttgtgtgtaattaggttgttttaatgttatttataggttgtgtagaaatggtgtgttattttttattagaattgtttattttttatttttgtgtttatgttttatatttagttttgatatgttttaagtatcgtatgtgtgtgagtttttatatattgtatttgttttataattttatgttatttgtatattttatgttttggtatgtttattttagtatgtgaaggttatatattttattttgttttggttgatatgtttatggttttattatttgtagtagtttttatgtgtgggattttatggtttggttgaatattttatattttgatgtttgattgaattggtttgtttgttgtgtttttttagttatagtttatagaatatatgtgtatgcgtttttgtatgatatattgatgtaataggattatagaatgtgtgttataaatttgttattagtatattttgtgagtcgtatgtttattaaatttggttttttattgtatttttaaatttttggatttttgttttttaaagagggttatttaatattaagtgttaagagaagaaggtaattgggtttttaggtttgtaaagaattatttttgtatgttttattttggtgatttttttggtttatatttttttatataaatattatttttttagtggttgtgtatagtttgtgtttatgagtttaatgtatgttatagggttaattttgttgtgaattttattgttggtatttatttatggatattattttttattttttgtattgttggtatatatttgatgagagtagtatttttttttgtggtattttgattttattcggtatattttttttgtgagatgatttttttttgattattgttattttgtttttattatggttatgtattgtatgtatttatttagagtcggttattattaggtttggtgtgttcgttatttttttagtgattttttttagtagttatttttatttaagaggataattatttaatttgtgattagaatcgttatttttgttattaattgtggttttatgggtgggtatatagttttagaatttgtttagtaagtgtttattgagtatttattttattttttattgttttggtattggagataagatagagtttttgtttttaagttgtttatagtttaaggagggaaataaaaacgttagttaatatatagtgtgttgttaagattagtggtttttaaatttaggcgtatattagatttattagagggtttgttgaaatatagattgttagttagttacgatggtttatatttgtaattttaatagtttggaaggttgaggtaggaggatcgcgtgagtttaggagtttaaaattagtttgagtgatagagtgagaaaaagaaaaatagattgttggatttaatgtttagaatttttgatttagtagatttggggtgaagtttaataatttgtatttttatatttcgagattcgttgattaagataaaagtgtaaggaaagtataggtttggaggggtttaggtagttttttaaaaggtgatattgagttgtgtgaggtaggagaagagataggtattttagttaaagggaatagtatgtttaaggtggggaagtatgaaagattatggtgtttgaggaattgaagtgaattagtttgattggaataaagagttttgtgaggatgtggtcgaagatgtaagtagaagttaatttattaagaagagtttttaggtaagatagggaaatgttttgtgttttagaaaaatttgtgttaatagaaaaatttttgtggttgttacgtggaagatggattggagggagttgggagtttattttatatagtttaggggagaaatgatgttgttttgaatttgtaggggtagtgggatggagtagtttagaaagtttacggtattttaattggtagggttttttgttttttttattgtttgttattttttcgtttggtaataggtttatttttgagtatagttttttttattatgggaagatagtgtttgtggttttagtaggaatgataggtatttgtttgaatattttttttgtgaattgttattttgtttttaatattggggtagagtggaggaaggaggaagaatttagaatataggttttgtgtttttgttttttttttttttgagttttttttttttttagggtaagtgttgttaggttatttttattttatttttttttttttttatttggtgaggttttatatattgtatttgtttacgtaaagtgttattagaaggaagggaaagggtagtaggattcgtttgtttgtttggaggtaggattggtttttgtagttattttaggtatgtttataagtttatttaggaataggggagttgtttgggtggagagggatttttttagttatgtatttatatttttttatttgttattgggtgtaattataaatttgtgtttatgtgtgaatatgttagtttttgtatgattgtgtgtttgttggtattagtgatacgaatttttaattttgttatttggtttttgggtatatggttgtgagtgttttgttataattattatatatgttgtgtgttgtgttcgtatatatatatgtaatatatattagtgttagcgtaatggagtggttaggaatataggcggtttagatttaatttagaaattgttgtttaggagttgtatgattttaggtaagttatttagtttttttgggtttattttttataaaatgtaaatagtaatagtattttttagattattatatgtattattttaagagtttaatttaatgtatagattagtattgttttatagaaatataatgtaagttataatgtaatttttttatggtagttatatttttataaggtaaaaagagtgaaattaattttagtaatatatttttttgaatttgataatatttaaaagattataatttttttttttttttttggaaatggagttttattttattgtttaggttagagtgtagtggcgtgattttggtttattgtaattttcgtttttcggatttaagtaatttttttgttttagtttttcgagtagttgggattaaaggtatgcgttaataggttcggttaatttttgtatttttagtagagacggggttttattatgttggttaggttggttttgaatttttgatttcgtgatttgtttatttcggttttttaaagtgttgggattataggcgtgagttattgcgttcggtttaagattataattttaaaatgtagttagtataaaagattagtaatggatattttatattttgttttttatttagtttttgaaatttgatgtgtattttatatttttagtatattttagtttagattagttgtattttaagtagttatatgtaggtggtggttattttttcggatagtataagtatagattattataagatttttattagttataagtgttagttattatttttgttgttatttattattaggtatttgtgaattgtagatgtttgtgttttgtgttttttgtttgaatatattcggagtttttgggaagagtggtgggagagtagttttgagttttttttttattatttttattttagagagtttttttgggaaggttttaatgagatttttgttttagtttgtgttttaggtttttgtttttatagtattagtttttagttttgttttttgtgttttgtttattttatttttttttagaaattaggttgattgttttttgttttattttttgtaggtggttagaatggatttgtggttaggggtatggatgttgttgttgttgttttttttgttgttgttttttttgttgtttattttgtggttttgtagttttagtgttaagtatttttttaagatggttttttataatggttggattttttttttggttgtgttcgttatttttgtgtgtgtcgtgcgaggacgtaacgtcgagaatatgaagtgaggggtaaggggttttgggtaatgagggaatttaagggtataaagtgagtagtggattgggggaagggggtatggtgtgtgtagaaaagattgagagagattagagatagggaatggggagaggattgtaaaggtggttagaaagatagtaaggtggggggagttgaggtatgtagatggatattaatggattttattgggattttttgttatgattttataggattttgcgtttaatgttgttttatattaaatatttgtacgggattcgagtggaggtgcgaggggtttattatttttttttttcgtagttttatgttgttgtttttaattattagagttttttcgatttgtttggtgagattttattatagggtatattttttttagttatgtttttttttttgaaattttttttagaatatttttttttagagatttttaatttttttttttttgggatattgtttttttgttttttatttaggtttttattttttgggtagaattgtttttataagtagggtatatatatttttggttatttttttttttatttggggtttttttttttgtttagtttttttttttatttttagtttttattagagggtgatgagttgggtgaggtgggttgttttttgtgatattttgtttttatttcgatttttatttatttttattttgtttaagggatgatggaggtattgttaggtcgttgtgtgtttattgttaagcgcgagttattgtgggttggttttgtcgggttggtttgttggttggtaggagttatttttatcgatcggaagcgtacgggggatgttattagtgttatgtttgaggtcgtttagattttgtttatttaggacgtgagttattttggggaaatgggggattggagggatatagagtagaatagttgtaaataaattgatatgtagggttagtgggttttaaaggttttattataatattatatttattttgatttttttatatgtatttgttttttttgatttttttttttttttaggtgagggtttgggtgttttttgagggaacgagaaattataatggttttatgttgttttttaaacgtggcgttttttattttgtagtgtaggtttaggtgattattgtttttcgttttgttatttagttgttaatttttattatttttttatttttgggtaggggtttattgtaggagtttttgaagagagttgtggattgatttgttttaatttttttttaggtttttattgtttttatagttatgtttttttattaagatttttattgtaagaaggagcgtcgttttatttcgggtgagggttttgagtagttttggggtagggtgtgttcggagaggttgggaggatatttttgtgaggtagggggattatttagtgttagagttatgagatgtttatatagttatttagtttaattttatattagttaataagtttttattaagtatttattatattttgttagatgggtagtatttggttttattaagagaggttgttattaattttaataggaaagataaggtttgtgtgtataaagttgtaatgaataatatttatttagtagtaaatgttaaatttagaggaggggggttggaggggtgttgaggagatgtttgaattggggattggagaaggttttgtataggagaagggttttagaagtggtagttggtaagtttagggatggttgtttagggttgggggaagagaattgaaaggttgaggaagagtattattcggaagttgggttttatttgtgggtaaagatttgggtggataggttatgatggtgttttttttgttttaggataatgttaggtgcgggtgttgtttttagtgtttacggaagggttgatattagatgacgttttagttttggttgatagagttcggtattttatgtttattgtttttcgggaaatttttattgatggtcggggtggtggtgattatttgaagaagtttgggggcggtgggtgaattttggttttgagttttttttttatttgtttttatttttttttttatatttatttatttagtgggttttgaagtagggttaaatttttttttttgttttttttttttttatttatttttttatttggaatttttaatttttgaagtgaatgtggatatagcgttatttttgtttttttttggttttatttatggatttttgtttcggtgtagtttttatttttgatttttattttttattgttttgtttgtgggatagttgttttttttttatttttagtgatttagtttatataagggaggggaatattttatttttagtggagtttttttttatgtggttttttttatttttttattttatattggttagtggatttatttattttttggaataaattttttttattttaaagtttatggatttaatggatttatttatttgtgaggaggatttttcgttttttggttggaagttgatatttgaagtatttttaggtttattttgggagttttttttagtatttttatttttttttttagtgtagttttttgttagtgggggttggatttttttaatttagaggttttatgtttgtttttgtttagatgtttagggtcgtgtattttttgggatattagtttagtttttatatttttggttttttgtttttatagtatagttttttagtggatatgattttatttagttttttgtagttttgttgtattattttattagatataaggggaagaagtagatattaggtgttgtatttatttttgttttttggggagttggggaaaggaacgaattttggttggaggggataggagggtttttaatttatttttttttttgttgaggtttttttttttttgagttagtttttatttttttttggtggtattagttattttttgttttttattttagatttgtttttataattggggaggtaggttgggagtaaaaggagagggtgggatttagttttgcgtggttggtttttattaattatttggataatagtaaaaaaattgaaaataaagagagagagagatttgggtgttggtggttgtatttgttaaggaattgaagtagtttttgtttaggtaatttgtttttagttagaagatttaggggtaggttaagaatataggtttttttttttttttagttttttgaagtttttattgtttattgttttttggtggttgatagttttatttgtagtttatagtcggttaattttagaggattagtgggttcggtttttgtataaattagggggtaggggtgttgtagaggttttttatcgatgattgacgtcgaggtttaggttgttgtttttataggagtttggttaatgatatggtagatatagtggttgtggttagtttggagtggattatattgttatttttattaaataataagtgaaattgttgggttggggataggattttagaagagaacgatggtaaagtggagaggtatgaggatagtgaatgttggagaggggtttggaggaaagagggaatgtttgaatggagaggggttttggggaaagttggggaatagaagttaaggcgggaggagtgtgaggatttataggtatttagttttttttttagtagtagtatttggtcgttgagagattcgattcggttatttcggttttatagtttagttatttgttttggttgtagttttttaggcggtacgggtagtatcgttttgatttaggttttagtttgatcggtttattagaaaggaagagatgttttagggtattgatagtgacgtttggtttcgttttatttagtaggtttggtttatttgttttagtcgttttaggcgttttcgtagttcgtgaattttttgttttagagcgcgtttattttttttcgtttttcgaattagggataaaggagattaagagtgtgattattattcgagttcggacgttcgtttcgagtttttcgggtggttcgtatttttgtttatttatcggttacgttgagtatgttggtattggttgggggttttggggatttttttatgtaggtgcgttcgtttacgtttagtattaggttatgggggtagtcgtaggtgaagttgtttgtcgtattaaaataatggtgcgagtagagggtgatgttggttttatatttatttacgtttagttatcgaaaaaaggaaggggttgagagagggggcgggggtaagtatttgggtaggtggggaggataagttgatttatttatatgatagtgtttttttttttagtcgggggcgtattcgtattggttaggtttaacgtagacgttttcgtttaggtaaggtttggcgtagatggttgaggatagaggaagtggggtttagatttaaatcgacgatttagttttttagtttcgtggggcgcgtttttcgtaaggttcggaagatttagttttatttttataggtgagcgttttcgggtgtcgttttttttagttttggtagtatattgtatgggtttgttgaatttttcgttttatttttcgttatataacgcggtatatggttttggaatatagcgttcggtttaggattttgagtacgggttttagttggggtttttggggttttatttttttattttttatttgtaagtgttgtagatgcgttttttagcgtataaggttaggtagggtttgtatattggttggttgtaggattcgttgtagtggagcgggattattagtgtttgtttggagtagattttttgattgcgtttatgttagaggatgaggtgggagagattgagtaggttaggttttggggagttaggagttttattttttttaagaggttattgaggtttttcgttttttttttagatgatagttttttatttttattttaaatttatagttatgttttgttttttgtgaagttttatttttagtagaaggtttttgagaagagtttatttcgggttttattttttttgttgttatttttttttgagggatttatttttggttttttcgtttggtattagtagtaggaggaaggagaattcgtttaagagagtgtatagtttagttttggattttatgattcgttttgacgttggattttataggttgtaggtaagaaaaggttaatggatgttcgtttttttttttattaatttttttagtattagtttttttaagggtattttgtaggtattttttaagggagttaggatatttatttttatatattagttattaggattgtttatatttgtgtgtataatttaatattattttgtttttagtatattatgatttttttagtattataaaagtttatattttagtatattttttttattttttttttaatttatttatttttaattttttttgtataatttggagggatatatagttaattttttttttatgatttttttgtttttttttgggtttttttttgtttttgtttttgagaaggagtttcgtttttattatttaggttggaatgtaatggtatgtttttgttttatcgtacgattttcgttttttaggtttaagtgatttttttgttttagttttttaaatagttgggattataggtatgcgttattacgtttggttaattttgttttgttttgttttgtagggtgtgagggtatatagttagggttttttttttttggttttttttttgttgttgttttttgagacggagtttcgttgttattttggttggagtgtagtggtgcgatttcggtttgttgtaagtttcgtttttcgggtttatgttatttttttgttttagtttttcgagtagttgggattataggcgtttgttattacgttcggttaattttgttttgtatttttagtagagacggggtttttttatgttggttaggttggtttcgaattttcgattttaggtgattcgtttgttttggttttttaaagtgttgggattataggtgtgagttattatgtttggttaatttttttgtttttaatatgtttttttataattttatatttttaaaattttagttggttgggcgcggtggtttatatttgtaattttagtattttgggaggttgaggtgggtggattatgaggttaggagttcgagattagtttggttaagatggtgaaatttatttttattaaaaaatataaaaaattagttaggcgtagtggtggacgtttgtaattttagttattcgggaagttgaggtaggagaattttttgaattttggaggtagaggttgtagtgaattaagattatgttattgtattttagtttgggcgatagagtaagatttcgttttaaaaaaataaataaaataaataaataaaaaaaatttttagttatatatttttatatcgtatatataaattaagtatttggaaattttatattttttatatattgttattttttttatatatttatatcgttatataacgttttaaatgtatattttttgttttaataaaatatttcgtaatttatgtttattttaaggttttgagtaaattttattttttttttatttgaaattttttttttatttgtttttttttttttttttatttttatttggttttttttttttgggaggttttaagtagattagttttagtagaagtagtttagattggtgggtgggtttggtaggttaagaaggagaggaggggttgggttagagagtttttttatttttgtttttttttataagttttttttttagttttagtagggttagtttagtagggttaagttttattatttttatttttattttagtaaagggttttttagaagtatttttttaattttttgaggtttttatttttggattttttagattagaagttatgagttttgtaatattattagtatttttttgaatttaaaatagattaggggagagttagggggtagggagagaattagttgtagggaataaagtagtttaggttatgggagaaaaagtaagattagttgaggaaagttagaagggtaagtcgttataaaggggtaggggggtagtttagggtattaaggggaaaattgtttttttttttttatgatatttgttagggtttagggggaatagaattgagttagttattattttttatgttagaatagatagggttttattgttttagttaaaatttttttttttaaggaagaggaggtttattgtttagttttatatttagttttggtttataaagtttaaaagcggtataacgaatgtttattttgattttttgttttttcgtttagtttgggggtggtaggcgtattttatttatgaggttgaggtttaaattattggagttttgagtttaattttttagttttggggattgggagaggaagagaattgtttttagtaggaaagaattcgtagagaattaggaatttataaagaatgggtattgagagagagcggaaatattaagggggtttttattttagattaggtatttgggtatttaggttttaggtttcgtttttattttttttggggagttaggttttttttatttggaaatgagttaagttatattgaggaaatggaattttatttttataaatatagggataatatttatttaaaggtagttaaaagagggtttggggttttaaagaaattaggtttttttaggggggtattttaatattgattatagggattgggggatttttaaatttgagatgggttttataggttatagatattttttaatattgatattttaagaacggaattgtttttataggggagttttagaattttatttttatgggtagttttttttaggagttgggagggttgatgttaggggattttagagaaaaaagggaatatggggaggagagaagttaaaaatgttttgagtggtttggaaggagatttttgtggtgggtagggggtgggttttttatttatatagttagatacggaggagtagtagtagtaaaagtagttataagttaaaaatatggttttttattttttaatttcggttttgagagaaagggatagtacggagtaattttttaaatgagaggatatgaggtaggggaggtttggaattgttatttatggaggagtagaggaagggggttttgggaggttaagtttttattaaaatttcgtttttattaaaaatgggggataatatgggagtaatgaggtggttataggtatattaaagtttgatatttgttttttaaggttattatttggtttttggatcgaggagtttttggggatttttgaatatatttttaggagagttaaggtttaatgtaggttttataaagggtacggttggagtgttaggttgtgtgggagatatcggttattggatattttattatggtttttcgggttaatagagtttttaatttaaaagaatttcgtagataaatttttaaggtggtcgaaggggcgtggaagtatggaagagagatataaggagagataaagtgagttattgttgggattttggattttttttttatagggtgaattttttagtttaggagttatagagagggttttggaataaggtgggatagcggttagaaggggaagtaattttagggggtttattagttgtttttttatttttaggacggttttatttgtattatagaaattaaagaagttataaagagatttggggggaggttattagaagagttggagaaaatttggtcgggcgtagtggtatacgtttgtaattgtagtattttgggaggttaaggagggtaaattatttgaggttaggagtttaagattagtttgattaaaatggtgaaattttatttttattaaaaatataaaaattagttgggtatggtggtagatgtttgtaagtttagttatttaagaggttgaggtaggataattatttgaattcgggaggtggaggttgtattgagtcgagatcgtattattgtattttagtttgggtgatagagcgggattttattttaaaaaggaaaggaaaggaaaaaggaaagaaaaaagaaaaggaaaaaagaaaggaagaaattaaggtgggttaaggttttaaaggaatttaaggtttattggggagataggtagtagggaggatatttaaaattattttattggatataatgtattttatgaggtgatatattgaagatacgattttatttttgtagaaattttattaaaaatgtattattggtcgggcgaggtggtttatatttgtaattttagtattttgggaggttaaggtcggcggattatttgaggtcgggagtttaagattagtttggttaacgtggtgaaattttatttttattaaaaatataaaattagttgggcgtggtggtttaagtttgtaattttagtattttgggaggtcgaggagggtggattatttgaggttaggaattcgagattagtttggttaatacggagaaattttgtttttattaaaaatataaaattagttgggcgtggtgggcgtttgtaattttagttatttaggaggtagaggtaggagaattgtttgattttgggacgtaaaggttgtagtgagtcgggatggcgttattgtattttagtttggcgatagagtgagattttgttttaaaaaaaaaaaaaaaagaggttaggtgtggtggtttatgtttgtaattttagtattttgggagattaaggagggtggattatttgaggttaggagtttaagattagtttggttaatatggagaaatttcgtttttattaaaaatataaaattagttgggtatggtggtgggcgtttataattttagttatttaggaggttaagataggagaattatttgaatttggtaggcggaggttgtagtgggtcgagatttgttattgtattttagtttgggtaataagagtgaaattttaatttaaataaataaataaataaaaagatattaaagagacgtaataagattatgtaatttaagattttgatttggattttttattgtatatttttttttgtaaggatagttggaaaaatttgaataatttgtgagcgtatatttaggaaaatttgaatttatgtttatatttaaatataatattaacgtatataaataaatgtatatatatttagagaaaaaagatattaatgtaaatatgataaaatgttaatatttgcgaaatttaggtgaggagtataaatgattgttttttgttattttggtaatttttttttttttttttgagatagggttttattttgttatttaggtaggagtgtaatggtgagatttcggtttattgtagttttggttttttaggtttaagtaattttcgtattttagttttttaagtagttgggattataagggtatattattacgtttagttaatttttgtattttaggtaaagatagggttttgttatgttgtttaggttggttttaaatttttgggtttatgtttcggttttttaaagtgttaggattataggcgtaaattttttttaagtatgaaattattttaaaatagaaaggttttaaaatttttttttttttttttttttgagatagagttttgttttgttatttaggttggagtgtagtggtattttgtcggtttattgtaattttcgttttttggttttaagtttttttgttttagttttttgagtagttggaattataggcgtgcgttattaggtttattaatttttgtatttttagtagagatggggttttttaatgttagttagttgttttcgaatttttgattttaggtgatttattcgtttcggttttttaaagtgttgggattataggagtgagttatcgtatttagttagatggagttaaaattttttaattaaaaaatattggttaggtaaggtcgggtgcgtgggtttatatttataattttagtattttgggaggtcgaggcgggtggattacgaggttaggagatcgaaattattttggttaatatagtgaaatttcgtttttattaaaaatataaaaaaattagtcgggcgtggtggcgggtgtttgtagttttagcgatttaggaggttgaggtaggagaatggcgtgaatttgggaggtagagtttgtagtgagtcgagattacgttattgtattttagtttgggcgatcgagcgaagattttaatttaaaaaatatatatttatttatatatagagagagatatatattggttaggcgtagtggtttacgtttgtaattttaatattttgggaggtcgaagtaggcggattataaggttaggagatcgagattattttggttaatatagtgaaatttcgtttttattagaaatattaaaaattagttaggtatggtggtgggtatttgtagttttagttatttgggaggtgaggtaggagaatggtttgaatttaggaggcggaggttgtagtgagtcgagattgtgttattatattttagtttgggcgataagaataaaattttgttttaaaaaaaaaaaaaaggaagaaatagtgatttggaatattaaaaatgttatataattatgagttattattgttatttatagggttgtggtagatgtgaaatgatatgatgtatataaaatttattatttattattatattattataatattttaagagatgttttgtttttattgaaaattgtttagtgtttttttattttatttagaatttaaaaaaaaaaattaaaagtttggttatcgggattgtcgggaaatagggatgaggatatatatatatatatatatattttttttttttttttttttgagatggagtttcgtttttgttgtttaggttggagtgtaatggcgtaattttagtttattgtaatttttgttttttaggtttaagcgatttttttgttttagttttttaagtagttgggattatatgtatgtattattatatttagttagttttgtatttttagtatagatagggtttttttatgttggtcgggttagtttcgaattttcgattttaggtgatttattgtttcggttttttaaagtgttgggattataggcgtgagttattatatttagtttattttttaatgggtatacggttttagtttggggaaaaagaagttttggagatggatggtgttgatgggtgatggttttataatgatgtgagtatatttaatgttataaaattgtatatttttaaatggttaaaatggtaattttatgttatgtatattttattataaaaaaaagaaaaaaaaatattaagggttttattttgatttgttaaggtttgatatgtttggttttttgttattatttttagttttttttttgttttttttttagttttttgtgtattagttatgttggtttttttattgtttatacgtgttttagggtttttgtaggtgttagattttttttttggggggtttttttatttagagtataatttttttttttattttttttagtttttaattgaatggtgatttttttaggaggattttttcggttattattgaaattaggtttcggatattttttaatttttttttttgttttattatttgatatatatatttgtatgtatgtattagttattttataaattagaatataagttatataatattagggattttttttttatttattattgtatttttagggtttagaataagtttgcgtttataatgttgaataaatatttgttgagtaatttaagtagtttaggtgatattatagattatatatggtgatttataatataggtaagtatatagtattatggagttatggatttttttttaaggaataggatggaggggataaagttggaggttgttataatagtttaggtaagtaaagaggtggtaggaaatgtgataaaatggtataaaattatatatatatattgaattaatgtgaattttttggttttgatattgtgttataattatataggatgtaattattgggggaagttgggtgaagggtttcgttatattatttttgtaattttttatgaatttataagaattttaaaattaaaagtttttataaagtgggggagggggtgatagggatggagaggagaagagttagtaggatttagtgattggtttgatataaggggttgggatatgatttttaggttttggttttgggtgatatgatgaatggggggaggagtattaattgaatagtggaaggagtaggttagtttaggtatgagataaagattaattggggttgggggatgtttttagttaatttttaggttataaaattttttattatttggattgttagggagtaataatattattattagggtttttaattagtattaggtggtttatacgtagaaagttttttcgttatattgtaggatgggaagaagagaggttgagttagttataggggttaggttaggttggagagggagatatagggagttaaagaagtagaaaaagtaatataggtaggagtttgaatttttatttgtggtattgggatggtttttttttttattgattagggttaggaagttgttggtattgaggtataagttatcgtggtggggatttgggtataaatagtagttagaaaaagaagtagaaaagggaggtaagattggtggtgaaaagtttaataaggaagttgtagtaatagttaaggtggatagtaataaaatagtagtgataatgtaggttaggtgcggtggtttatatttgtaattttagtattttgggaggtagaggtaggtggattatttgaagtcgggagtttgagattagtttggttaatatggcgaaattttgtttttattaaaaatataaaagttagttaggcgtggtggtgtatgtttgtaattttagttattcggggcgttggaattatttgaatttaggaggtggaggttatagtgagtcgagattgtattattgtattttattttgggagatatagtgagattttattttaaaataataatagtagtgataataatcgtaaatatagtaataagtatttttttttttttagatgaaattttatttcgttatttaggttgaagtgtagtggtaggattttcgtttattgtaatatttgtttttcgggtttaagtaatttttttgatttagtattttgagtagttgggattataagcgtgtgtttatatttagttaaattttttttgtatttttagtagagatggggttttattatgttggttaggttggtttcgaattcgattttaggtgatgcgtttatttttttttgttaagatattgggattataggtgtgagttattatatttggtaatagtaagtatttttatttagtatttattatatgagttaggtattatttaaagtatattgtatttatttatttatttaatttttataattatttggtgaagtatatgttataatattttatagataaggaaaattgagtaatagaatggttaagtaatttgtttaaaggtatttaatagggttaagatttaaatttaagtattttggttttatggtttggtttagaggttggtaaattgtgattaaaggattaaatttagtttgttatttgtttttgtaaatgaagttttattggaatataggtatatttatttatatatggtatatggttgtttttatattataatagtagaattgaggagttgtgaaatagattatatgttttataaagttaaaaatatttattttttggttttttatagataaggtttgttgatttttatattagattaaattttttaaggtaataaggtgatatatttaaaatattttgggttaggtgtaatggtttatatttgtaattttagtattttgggaggtcgaggcgagtggattatttgaggttaggagttcgagattagtttggttaatatggcgaaattttatttttatttaaaatataaaatttagtcgggtatgatggcgtttgtttgtaattttagttattagggggattgaggtaggaggattatttgaatttgggaggcggaggttgtagtgagtcgagatggtgtattgtattttagtttgggtaatagaataagatttcgttttaaaaaaaaaaaaaattttgaatagagtttgtttaaataatttaataaatgtaagttatttttattgttattattgttattggttgtagtagaggtggaagtaattgatttgatttatggaagttttagtttagtatttttatttattatgttagtagttgtagatggagaatttttggttttaggggttatagtagattcgatagaggttagatcgtatggaggtggggaatagttattttaagtagttcgtgtttggtaagcgaatggtaatgttaagtgattataaatttttgtttttttaaaatttagggtattttatggagtttagtgtttatttatttttatattgttttatttgtggagaggagagggagatgaaagaatttacgttgtgattatttatgatagaaagtagagttcggtatataaggttttttgtaagtagaatattatattgggtaggtatttaaggatagtaaagttagtagtattttttatttttattatatatatatatatagagatatatatagatatatattgtatataaaggagattgaggtttatagaaggtaggtatattttgtgttaaaaggttatatattatataagtgattgagttcgaattagatgttgggttttttgtttttagttttaggatgtttttatttgttttattagtttttatgtttaagaattatgggtaataggaagtaaaagggtagtagtgtagggagttttttttttatttaagatagagatgagatttaggtgttgagggaagttagaaaggaagggtttaggtattagggttgtgtttggagtaatgtggtttagaaaaagggacgttaggaagtgttttttagataaggattaagttttagatagggtttaggagttaggggtaggggagtcgtttattttgcgagtagtagatgagatgtattttttgaggggtttttgttatgatggggattatagtttttcggaatttttgtatttgtttttataggggtcgtaagtttttttttttatcgaagagatcgagtattgttattatagtttcggggtgtgtttgtgggaagggggtaatgtagttatcggggataggttaagaagtttttatacgttattttttggttcgcgtttataggtttattgtattttgttagaattagggatttcgttttttaatttttttttacgttagtattagttttttgaggaattgggtaggtttagaggggtggtttttagtttttcgtttttttttttttgttatagtagacgtttttaacgttttgtatttaggtgttttttgttagattttattgatgtattttagtaggtggcggaagttgtacgagttgtcgaagagtttatgtattacgatgatcggtttgtaggacgcgcggtggggcgcgggggttgtaagtagtagtagcggtaggaaaggtaatagaagtaggatttacgtcgcggggagtcgttgtttttagagttttagtatgttttcgtttgagaaaggggtgataagggtatgtgagggagatggtaatatttttttttttcggaatagacgttcggtaattaagttattttttttcgtttttatattaggttcgtgttataaaatagtttatttttaatttattttagttttttttttataaatatatttttttattacgttgacgtattaacgcgtattcgaagtttcgtttttaatttagcgttcgggggatttgttttttaggtttaggatttttttaatgtatcgttttagttatgaataacgcggagttttttaatattcgtgagtagtagtttaggttttttgaagagtgtagatttttatttggtttgggttcgtaggtttcgttttattcgttgtttatttattttaagtttggaatttacggtggcggggggaagggtgaggaaagagaacgtaggggaatgacggatgggagggggaagggcgggttgtttggggtcgcgtaaattcgttacgttcggggttttttttggtaatcgcgcgagcgtttttcgtaatatagatttaggataggaggggtaatggaatattttattgcgttttaggtgttggggaggaaataggcggagcgatttatttaggttagtggggagaggaaaaagtagtaaatatattttgggaatggaaagaaggtttttttaggtttcgttgtttttagcgattcgaaagttcgattttttcgttttgattttttttattttttaatataggcgtttggtttcgtagtagaatacgaagtttgtattttttaaggggcggttagggggcggattagggaaaggtagttttttgtattttgtcgtgtgttgggtgagtggtagggtggtttggagggttgatgttagttcgggcgtgttttttaatatttattttattttattttttagttcgttttaggttagcgatttataattttttattttgaagtgcgtgtagtgtttttgtttttagagacgtagagagttttcgaggttttttgagttaagtgtagtttggtttagttttttttgttttattttatttttttttttataagcgatttatttttaaggggcggagggcgcgtagggatgcgttgatttatgttcgcgtaatttcgattagttttttaatttgaacgatttttagaatttggttgtttgagttatttgtgggtggttttttatcgaaatttttaggcgttttattttttcgtttgtgatttttaatcgatattttagtgttttagggtttttatttgttagggtttttatttagtatttaaagacgtttttttagagataaggattttttagtatgtttgagtttttttttttgtttataaggttattgtttggtttaaatttgttttaattaaaatatttttgcgtttagaatggtgtagagtgacgatgaggtggcggtaaggggttgagcgtttacgcgaacgtttaagtgattagaacgattggtgtgaagtcgtgatttgattttgtggagtttgggattggttttagcgagagtttttgtattgttttgtagtttttgttaggatatggacgaaaagggacgtagtcgggagagcgattgttttaggtgggggttggggggacgtaagggaagaataatgattatttggttgtgtttttgtttaaaaaaaaaaaaaaattggtgtaaatttttatagattttttattttcgttttttttatttatttacgcgtttttaagatgtaataagtaaataaaaagattaataacgttgtattgtaggtcgatttaggagttggagatgcgttttggtgggaggtggtgggtgggagtaggggggtttagggaatggatttgaatattgattagtttagagattttaagtagttttaaaagtaaagggaaagtgggggaataagtatatattattaatagagttgttagaaatgagtagttaagttatattttttattttttttaaaagagttttagttttttagttttggacgaagaaggtatgtatgtatatcgtttaaatttttttttttttttttttttaaggtttagttttttttgatttatagatttgggtttttttttttattgttaggttggtaggtttattaaattttgggaattttttagattatcgtagttttgaattttgtataatttttttttatatataagtatttattttttttaaagaggaggaaattggggttaaggatttgggagaagattttggtattttgtagggagttaagagggggagacgatttgtttttggaggtatttgggttattaattttattgagaatttgtttatttttttttataatataattattgagttttggtgggggagattttagagagtttttttttttttttttttttagttttattcgtttcgtttggtttagttttcgtgtttttatgataattttaaaggagtttaaattgggggtttgaatgtcggggtaagaggaggagagaggtggttcgagagtagagagagatcgagtgggaaatatttgaagcgttttttttttttcgtttcggtttttttaagtttttttttttttcgtttttttttcgttcgtttttttcgtttttttttttcgtcgttgtttttatttttttatttttgcgttgttgtcgttgcgttatttagtatttagattttagtatcggtcgaggatttttatttcggttgtagggattttgttttagcgagatcgtaggtatgttattcgaaaagttaggtaaaaataataataaaattttttattttttttattgtttttagatttttcgttttttttgttttaatttttttttttatttttttttagttgtggttttattttattttttttttttttagtttttaatatttttttagttttttttttttttttgttttttttttttttttttttttttttttttagtggtagtttttgttttttgttaataatatggttaggggggtaggttgagagggtgaaggaggtatagttaggttttgtagggatggtattattgggagtgatagatggataattattggttggtatggagatattttgtgaggaaatatggagatatgattagatgggggttgttaagggagtaaaatttagagggttttttttaatttgttttaaaagaggtttcgagatttttatagaggttggggtatttttttttttattgaaggaatagtagagtggaatatatgttattttatatgtgtttatataattgttgaattgagtatatattaatatagggttgtatgtttacgtatacgtatatataggattagttcggataggttagtttaaaggtagttatagtaaaggagaggggattaggtttgtaggtgagagttgggtgtatggtgatgaaaaagatagaaaagaagtagattagagttgtgattttaaaattagattggaaggaagaaggaggggggtagatggtttagatatagttttttttttgttttttaaattagagatggttttttattcgtttttttttatgtgttttttttattatttttttttatttttgatcggttgtgtttttttttattttttttttaatttattattgtgttatttttttttttatatttttttttatttattttttttaggatttttagatttagttttttatattttttcgtcgttttataatgttttttagtttttagtcgaatttttagttttatcgttataggtagttttttttttatattattattattattattattattattagtttggtatcgttattttttcgcgtttaggggtagggggtttggtttttttcgcggttatcgtttagcgcggtttttttttttttgttacgttgtcgaggtttttttattacgtttttttcggttttgttgtcggggtatttttattcggttgcgttattttgtttcgtatgttattcgatttttatttgtaggagattcgtttcgagggtttatttttttcgtcgtcgttcgttgtcgtcgtttcgttttcgtcggcgttagtttagattgtttaggtttttggtttcgtggtgtttacgtacgcggggattgtgggtacgttgtcgttggggggttacgtagcgttcggatattttttgtagttgtagttttgtattgtttacgtgtcggtttattcggtgggtacggtgagtgtcgggtagatagggatatgggaaagagggggacgcgatataggatttgaaattggggatacgttgggggttggtaggatagaggaataagggtagggaataggtagtgttttcgggataagttttagaaagaagggagtttgagataggaaggattagggagagatacgggagtaggagtttattggtgtttagagttagggtttgggagggggatcggagtttagaggtttagaggaggtttgaaagtaggaaatcgtttggcgggggacggggggaatggaagttgggaattaagagggatgtgggagaagtttgggattaagggggtaggggaggtttggtaggtgtttggagggaagaaagaaggtttgatttgaggttaggatagttttagtgggattatattttgcgggagagaatgtagaaagtttaagaatatggtggttaatgaagtaaggaagggaggagaggggtttaggtggaatttatgggtgttttggaagggtaatgggtgttttattttgagaagttataggtaaaaattgtgtttttaaagttattttgttagtcgtttaacgttggtaggttgggagagggttagagtgatgtttttgttttttaaatttttttttatagttatatgtaggcgggatttcggggggaataggagtgatttttatttttttttcgtcgttttagggtttagggttggttttattggagtcgaggcgttcgttatacgattatatgtttatcgcggtgttgattattatttgttgtttttggtttattggtattattgttatttttaaggtcgtgtaggtagggggtaggggtatattcggtttgggggcggggatagggagttttgggcgttttggggattattttagagaaaggttgaggcgttcgaacgaggtcgtagttttttgattttttttttttatttttttttcgtaggtgcgtacggttttggttcgcggagatatggtgtcggtcgagatcgttttacgcgaggttcggaattttttttttatttttttggtcgtgggtatcgcggttatggtgttttgtattatttttatcgtagttattattatcgtcgcgtagtattacgagaattattgggatttttaaaaacgtttttggttcggttttattttgcgtttttcgattttttaggttttttttgtagttatatcgcggatttaatgggcgttttgtatattcgtttttggggtcgttagatttggatatatcgtaaatttcgtttttacggaacgtttcgttttgcgagtaagttcggaatttagttttttaggaatttttttaaaatttatatttttagggacgtcgtttttcgggatttcggttaaacgtcggatttttagtcgttttaggtttttttatttttaaagtgtagcgtttttaatcgagtaatttcggtttggtttttaaaatttcgttttttttataagtatcgttttagttttgataaaatttcgtttttaggtcggtaggtttcgtttttttttttttttcgcggggtgatttagtttagtgattgggtttgtggttttaggtttcgtttatagacggatagatttttttttttttttcggtaaaaggatcgagttttggggtagtaaggtttttatatttttgttttttgtaagtatatttttgttttttttttatttaggtatttgtttatttttttgttaattttagaatttttttttttgttttttttaaggatatttgggaagtttttggtgtaggatttttttttttgggataagaaatttgtttgtaaacgttttgtaaatatttttttttatttattttagtttttgggtagtcgggtagaagggaatttaggttatggattttttaagttttcgtttttcgtttttttcggcggtttcgttttgttttgatttgtgtgtgagtgtgtgtgaatttttgaaagataatattaaagagatttagttgatttatcgttcgtaattttaaagattgcggtttcgtaaagattttttttatttttgatttcgttttttatttttttttatttttttttttaaggaaaaaaaaagaaaattcgatagagattaacgtgagggatatagatttttagatcgttagagagatacgtgaatatgggggacggaggggagttttttgggaatttattaaggaagattttggggtttatttttagtgaggttttatttttttagtgaggttttatttttttagtattttttttttattttttattatttttagaattttaggaagataagagaatagagagggtagattatggtgaagaagttggttaaggatagagtgatgggggttaagaagagatgttagttgtttatagttgtttttgattgtgggttggagggtggtagataatttggattagagttttatatgttggattgtagggggtataggaaaggtaaagagagtagattgttgtgggagtttagggaggaggttaatggttttttaagtttttttgggattagttgtttttttttattttgaggttaattaataggttttttttttgaggggagtggtgattaggggatgttgttagtagtgggtttgggtttttggttgtatatttataggatagggttttaatttaatttatgtatttatgtaatatgtagattttatgttggatgttggtgagatatttatttagatagtaggtgtgatttttgattttatggagtttataatttagaagggaagttatgtattgagataggaaatgtgataggagatgtgggaggagggtggggtgaggtgtgaatattatgggttcgtttttggatgtttcgtatttaatgtgtttattttattaaattttttgaaaaatagaatttacggttgggtacggtggttaatatttgtaattttagtattttgggaggttaaggtaggcggattatttgaggttaggagttcgggattagtttggttaatatggtgaaattttatttgtattaaaaataataaattagtcgggtatggtgacgggtatttgtagttttagttatttggaaggttgaggtaggagaatcgtttgaatttgggaggcggaggttgtagtgagttaagattaagttattgtattttagtttgggtaataagagcgaaattttattttaaaaaaaaaggggtaggggggtgcggaatattgttattagagatatgtttgtatttgttttttttttatatttattattttttgatttattggaatatgtatttatattttatttttttgaaattttttttttaaatggtaattaattatttagattttaaattaatggtatttttatagtattttgtttttttaagtttttttatgtttgttttttgattttgaattttttatatatttaggtttaagaacgtattattttttttttttcgatatatatatagatttttaattatttcgtttttgttttttttttttgtttttttttttttttttttttaagtgtttatttttgattttttttttttttttgagatttttttttgaaaagtttatttatttaatttagttaattaaatgtttttttaatttgtattttatatgtagacgttttttttagtgtttgaagattatagttatatggaagatgtttgttggttttttaaaattaatatattttaaaataaattgatgaaatgttatagaaaatttgtttttttgtttttgttaatagattatttttttaattatttttttttatttagaaatttgtcgtttttttttttttttttttgttttatttttggtgtgtttttaagtttagttagttttgttattataatgttttttgaatttgtaatttttttttagtttttgttggaaaaattattttattaggattattgtattagtttttttaataggtttttttattttttatttttttttattttaagtttttttttatattattgttagattagtttttttaaatatatttttataattttattgtttaaaagttttttaaggttttttattgtttatttaattatttataaaattttaatttggtttttaatattttttataatttaaaattatttagtttttttgtttattttaatttttaattatattgaattatttattatttttatttttaggtatttgtttagttgtttttaaattttagattttttttttaaatttttgtttattataaattaaattgtttgtagtttgttataaattttagaggttttagattatatttaggtttttgtttatgatgtttttttttttttgatatttgtttttttatttggttaaattttatttataatattttttaaagttcggattaatttattttttattgtagtaaaaaggtgttttttttttttttgggttagattaaagtagtgggtttttaaatagagttttaggtattttttggagtaacggtttttattttaggttatatattagaatttattggggagtattgaaaaatttgaaagtttatgtcgtattttaaaataattaaattagaatttttgggtttagtgttagtggtttatatttgtaattttagtattttgggaagtcgaggtaggaggatcgtttaagtttaggagttcgagattagtttgggtaatatggtgagattttatttttataagaaagtttaaaaattagtttaggttagatcgagattattttggttaatatggtgaaatcgcgtttttattaaaaatataaaaaaattagttgggtgtggtggtaggtgtttgtagttttagttatttaggaggttgaggtaggagaacggtatgaattcgggaggtggagtttgtagtgagtcgagatcgtgttatgtattttagtttgggtaatagagcgagatttcgttttaaaaaaaaaaaaaaaaaaaaaattagtttaggtcgagcgcggtggtttatatatataattttagtattttgggaggtcgaggtgggtggattatttgaggttaggcgtttaagattagtttggttaacgtggtgaaatttcgtttttattaaaattgtaaaaattagtcgggtatggtggtatatgtttgtaattttagttatttaggaggttgaggtagaagaatcgtttgaatttaggaggcggaggttgtagtgagtttagattgtattattgtattttagtttgggtggtagagaggtatttagttttaaaaagaaaaagaaaaaaaaaatttagtcgagttttatggtttatttgtagttttagttatttgggagggtgagacgggaggattgtttgggtttgaggggtagaggttttagtgattagaatacggtgttttagtttgggtaatagagtgagattttattttaaaataaataaaaaagaatttttgggggtggaattttggtattagtatttaagatataattaggtgattttaaagggtagttaaggttgggaattataggtttatagatattttaaggattatttagggagaatggaaaggttaaaaaatgattttaattcgggtaattttttttaggagaaaagtatttagatttaagatttatgttatttgtatatttttttatttttttttatttgatattttgatatatatagtttattttgtgagttatttgaaggtaagagttaaatttggtttatttttgttttttagatttttattagataaaattttttttattaatttttgaatttaattgaattgaaaggaattaggtaaagggagagatgaataaaaaatgatttagtttttttttgtttttttttaggaatgtttgttttttaattttagattttttaattttatttagattttttttttatgaggaaataaaatgttataatgtgtggtcgggcgcggtggtttatttttgtaattttagtattttgggaggtcgagatgggcggattacgaggttaggagattaggattattttggttaatacggtgaaattttatttttattaaaaatataaaaaattagttgggtgtggtggtaggtatttgtagttttagttatttgggaggttgaggtaagagaatggtgtgaatttcggaggtagagtttgtagtgagtcgagattgtgttattgtattttagtttgggtaatagggcgagatttcgttttaaaaaaaaaaaaagttataatgtgattttttttttatttgatttatttttttttgtaggtgatatttttggttgtggtatttttattgatagagattttattttttaggagaggttttgtttttttataatatttgtatgggtgtttttatatagatgggggaaaattatgattagattttgggttattattttttttttataatggaagatttagtatttgattattttatttttatcgtttattttatttttttttttttattatttatttatttatttttgagatggagttttgtttttttcgtttaggttggagtgtagtggcgtaatttcgttttattgtaattttcgttttttgagtttaatagatttttttgttttagttttagtaggtgtgattataggtatttgttattacgtttagttaatttttgtatttttattagagatagggttttattatgttggttaggttggttttgaatttttgattttaggttatttgtttatttcggttttttaaagtgttgggattatatacgtgagttatcgagtttagtttttttttttttttttttttttttttgaggtagggtttcgttttgttatttaggttggagtgtagtagtaggattatagtttattgagtttcgatttttcggttttaagtgatttttttagttaattttttttatttttattttattttttttttttgagatggagtttggttttgtcgtttagattggagtgtagtggtataattttagtttattgtaattttgttttttggatttaagtaattttttgttttagtttttgagtagttaggattataggcgtttgttattacgttcggataaattttgggtttttttttttttttttttgagatagagttttattttgtcgtttagtttggagtgtagtggtgcgatttcggtttattgtaagttttgtttttcgggtttatgttattttttcgttttttattttagttttttaagtagttgggattataggtattcgttattatgtttagttaattttgtttttgtatttttagtagagacggggttttatcgtgttagttaggatggttttaattttttgatttggtgattcgttttttttatttttttaaagtgttaggattataggtttgaggtatcgtttttggtttgtttttttgttcgtttgtttttgttttttttggacggaattttgtttttgttgtttaagttggagtgtaatggtgttattttagtttattgtaatttttgttttttaggtttaagcgatttttttgttttagttttttgagtagttcggattatcggcgtgtgttattatgttcggttaattttttgtatttttagtagaaatggggttttattatattggttaggttggttttaaatttttgatttcgtgatttattcgtttcggttttttaaagtgttgggattataggtataaattattgcgtttggtttttggtttttgatatttaatagagatgaggttatattgtgttgtttaggatagtttcgaatttttgaatttatataatttgtttgttttagttttttaaagtgtcgggattataggtatgagttatagtgtttggtttcgttttattatttttgtttttaatgtttatgtagattttttagtattttgttttttttttgtagtgatttatttttttttgtttttttttcgttttatgttatatttttaatttggttgttattaatatttattgtttttttaaaattttatttttagtttttttatgttgttttttagtatttttattttaaaaattttttaattttatttgggttttttatttattaatttattttttattgtttgattttaattttttattttttttattatttagtttagattttaaggtttaatacggtaatcgttttttagtttttattttgtatttttggtttttttttttttggtatattttatttttggttaaattttattttgtttgttttatatttgtatttaatagttggggagaaatatatagttatattgattggttttgttttttgcgggtttttagtgtggtatgttagttcgtttttttttatttagtttatattttttaaatttgagattataattttataagatgatgatttttttttttattttagtgagaaaatagaaatttttagaagggaatttttttatgtttttattttaaatttattagtttatttgtaattttatcgtagagaagttgatatgtatttatttgttattttatttgtatttcgggattttgtttttttttatttgtttagagatgttatttttgaaattattttttattttttttttttttatttaattagtttatttttttgtattgtaatatttttattattatgtaaatatgttataaaattatattttatttttgaaaagaaagaaaaaaattgtttcgttatttatttaggtagtaaaagtataatatttagagaatggtgtttattttttggtagaaaagtaatttggaaagggaaatttagggagttttaattatattggggaagattttattttttgtttttgtttttttttttttttttttttttttttgagatggagtttttttttgttatttaggttggagtgtaatggtacgattttagtttattgtaattttcgtttttcgggtttaagcgatttttttgttttagttttttaagtagttgggattataggtacgtattattatatttggttaatgttttagtagagataggattttattatgttagttaggttggtttttaatttttgattttaggtgattcgtttattttagttttttaaagtgttgggattataggtgtgagttattttgttttgatgggaagattttattttataagttgtttgatgtttataaaattattttttgtaatatatatatatttatgtatataaattataattttatatgtataaaataatgtatttatttttaaatttaaaaatttttttttgatttagtttatttttttagtgttttatttttttttttatttaataaaattttttattgtttttatttttttattttttatttatttttgaattttttttaattaggtttttatttttattattttatttaaattatatgttagagttataaatgatttttaagtttttaaatttaatggttaagggttagtttgtggtaggttaattttttttgatagttatatagataggtttgtatagtattttagttatatagatagatttttatagtattgttttaatattgagtaaatagttaaatttaggggaattggtgtatagatattaaagttagaaatgaaatatatggtgagtaagagttttgtatgggttttttttttgttggagtaagttaaaataatagagatagttttatatttttagtgttaggattcgtttcgggtcgacgatatttgagataagttaaggtaatagaggtagttgtttgaatagatttattggataatttaaggtagtttttcgtattaagttgtaaaggagataagatagaaataattattttggtattatagtaaataggttttgaaggtattggggtttttatagtttaattagatttagtaagaatttttttgtttttgattttttagttgaaataaaattagttattgatagattttggtgaatgttatattgtatgtaggtatataatttaaatttgtataaatattaagaaaatagtaatattggtcgggtgtggtggtttatatttgtaattttagtattttgggaggtcgaggtgggtggattataaggttaagagatcgagattattttggttaatatggtgaaattttgtttttattaaaaatataaaaattagttgggcgtggtggtacgcgtttgtagttttagttattcgggagtttgaggtaggagaattatttaaatttaggagtcggaggttgtggtgagttaagatcgtattattatattttagtttggcgatagagcgagatttcgttttaaaaaaaagaaaaaaagaaaattgtaatattttgagttggtttggtggaattattttcgattttttttttgtattcggtgatagtaataaattttttttttttttagtttgtttgtttttcgttattgggttacgagaaaatatagttaaatttggtttagttttaggaataagtttttaattagagtttaaattagggttttttagttttagggattattgatattttgggttagatagttttttgttatgggggtttgatttgtgtattgttttgttaagtattttttgtgggatattttgattagtggtttttaagagtgggtgatttttttattttatttttaggaatatttggtaatgtttagagttgttttagttattataattgaggaggtgtttttagcgtttagtgagtagcggttaggtatgttgttaaattttttgtaattggaggatataataaataattattttatagttatagtaaagaatgaaattggtcggtcgcggtggtttacgtttgttattttattattttgggaggtcgaggtgggtagattatttgaggttaggagtttgagattagtttggttaatgtggtgaaatttcgtttttattaaaaatattaaaattagttaggtatggtagtacgtgtttgtaattttagttatttaggaggttgaggtaggagaatcgtttgaatttgggaggcggaggttgtagtgagttaagattatgttattgtattttagtttgagcgataagagaaaaattttattttaaaaaaaaaaaaaaaaaaaaaatgaaattatgttttttgtaataacgtggatgaagttggaggttattattttaagtgaattaatttaaatatagaaaattaaatatttggttgggtgtgatagtttatgtttgtaattttagtattttgggaggtcgaggtaggtggattattcgagtttagtagttcgagataagtttagtttttattaaaaatataaaaaattagttgggtatagtggtatgtgtttgtggttttagttatttgggaatttgaagtgggaggattatttgaattagggaggtagaggttgtagtgagttggagttatattattgtattttagtttgggttatagagtgagattttattacgggaaaaaaaaaaaaaaaaaaaaagtcgggtatagtggtttacgtttgtaattttagtattttgggagatagaggcgggtagattatttgaggttaggagttcgagattagtttggttaatacggtaaaatttcgtttttattaaaaatatgaaaattagtttgatatggtggcgtgagtttgtaattgtagttatttaggaggttgaggtaggagaattatttgaatttggggcgaggaggaggttgtagtgagtagagatagcgttattgtattttagtttgggtaatagagtgaggttttattttaaaaaaaaaaaaaaatttatttattgggtataatgtttattatttgggtaataggtatattattagaagtttaatttttattaggatgtaatgtaattatgtaataattaattaggtgtattgtttgggtttaaaattgtgggggaaaaaaaagaaaagaaagaagaaaaaaattattttgttaggtgtagtggtttatatttgtaattttagtattttgggaggttgaggtagatggattatttgagtttaggagtttgagattagtttggataatataaggagtttttatttttataaaaaattaaaaaattatttgggtataatggtatatatttgtggttttagttatttgggaggatgaggtaggaggattatttgaatttgggaagtcgaggatgtagtgagttatggtaattttattgtattttagtttaggtaataggttgttttaaaaataaaaaagaaagaaagtattttttagttttttatttattgtttttttttagtttttattgatagtttttattttttttttagatttttaaatattagagagtttttggattttatttttggtttttttttttattttaatttaagtttttatgattttattgtttttttttttgttttttaattggattttttgtttttattttttattgatgtggtttattttttatgaagaaattagagtgatttttaaaattattagatgatattatttatttgtttaaaattttttgatgttttttgattatatgtgggataaaataaaaagttttttttatggtttatgaagtttatttggttttgtttttttttatttttttgtttttattttttattatttttttttttgtttattttgttttatttattttgattttttttttgaatttaatataaaaatttaatttttttttattttagggtttttgtattttttttttttttttttggatattttttttttagatatttgtatgattgtttttttatgttatttatatttgtataaatattatttttataaggaggtttttttttattatttgattaaatatagtattatggttaggtatagtggtttttgtttataattttagtattttgggaggtagaggtaggaggattgtttgaggtttggagattgagattagtttaggtaatatagtgaaatttcgtttttaaaaaaaaaaaaaaaaattagttagatatggtggtatgaatttgtagttttagttatttatgaggttgcggtgggaggattatttaagtttaggaggttaaggttgcggtgagttatgattatattattgtattttagtttgggtaatagagtaagattttataaataataataattattattattaataaatatagtattatgtatatttgggagtattttttattttatttttttattttttattttgttttatggtgtttatagtatttgttagtgtttgatattgtattaaattttattgatttttttatcgtttgttatttttaatttaatgtaagttattagagatttaaggttttttttattgttttatttttagtatgtagtatagtgtttggtataaaggaggtttttagtaaagattttttggttgggcgtagtggtttacgtttgtaattttagtattttgggaggttgaggtgggcggatcgtgaggttataaattcgagattagtttgattaatatggtgaaattttgtttttattaaaaaaaatataaaagttagtcgggcgtgggggtgtatatttgtagttttagttatttaggaggttgaggtaggagaattatttgaatttaggaggcgtaggttgtagtgagtcgagattacgttattgtattttagtttgggtgatagagcgagacgttattttaaaatagtaataagaataaaaattaattaattaaataaataaaattttttgaattattgaatgaataagtagtttatagagttgtgtgagagaaaaatagttaatatatataagatatttagaataatgttgagtattacggttataatgtatggttagcgtttagtaaggtgaagttgttattattaaatattttattgttaaaaaggttgttttttttttgtttgaaaattttgattataagggaagtatagtaaaatgttttgggattaaaaaggagggaggaacgattttgatataaattttagtaaaattaaaagttatagaaattattaaagttaaatagaaggggaaatttatttagtttttggaaagttagaatttttgttttttatgtagataataaatggaagagaataagtgtagtatatggttttatgtggtgagtatagaacgtaggggaatgtgagagtgtaaaaatttttaattagtttaatgtttggtgatagggtagtataaaggagtattggaatagtttgggaaaattgagatttatagattggagaggaataattttgggtgttaagtggttttttttattttttttattttgtgttgttttttttatttgtaataaattttttttatttttttttttttttttttttttttgttttgttttgttttgttttgttttttgagatggagttttgcgttggcgttatgttggagtgtagtggcgttattttggtttattgtaattttcgttttttgggtttaagcgatttttttgttttaattttttaagtagttgggattataggtatatgcgattacgtttagataatttttgtatttttagtagagacggggttttattatgttagttaggatagtttcgattttttgattttgtgatttattcgttttagttttttaaagtgttgggattataggtatgagttatcgtgttcggtagttttttttatttttgtatattaaatttgcggtttttttttaagttttaattttttgaagttatttatgaggtatttttagattaattttagttgaaaataatttttttgttatttattatttttttttttgtatttggagtattggttaatttgattttttatttttattagattattggtggggatttttcgtatttgtttttatattttattggtaaattttgggtatttaataagggttattgaatgaataagaaaaaaattttattttatttatttagagggtaagtattatatgttttgtgtgtaggaataagatgaaataattattagttggtaaattattttaagttagtttttgaatttttttttgggttttgttttaggttaatttttttttttttttttttttttttttttaaaagatagggttttattttgttgtttaggttggggtatagtggtgtgattttagtttattgtagttttaatttttgggtttaagtaattttttcgttttagttttttgaatagttaggattataggtgtattattttgtttagttaatttttattttgtagaggtagggtttttatgttgtttaggttttaggttaggttttgaatgaaggtaaataatgtttttttgggatagaataaggagaataatagagtatggttagtttttttgagttattttagaaggggaggatttagaaaaaaggaaggagggaagtgattttaggtaagatgtaaatatatttgtaggtaaatttttagaaatttgttaaatatggttttttttagtttaattttttttatttaaaggagtggagaattgttttaaaatggagttaatattttgtaattatagtagaattattgttttttttttaagtttttgtatttttttagatgtttttttgatttttttttttttttttgagacggagttttatattattgtttaggttggagtgtaatggtgtgattttggtttattgtaatttttgttttttaggtttaagcgatttttttgttttagttttttaagtagttgggattataggcgttcgttattatatttggttaatttttatattttattagtagagatggggttttataatgttgattaggttggtttcgaatttttgattttatgtgatttgttcgttttggttttttaaagtgttgggattataggcgtgagttattgtatttggttttttttgatttttttaatttaaagttttatttttcgagaggtttttgtgtagtaagacggggtaagtatgttttatttgtatttatacgatttttggaggtattggtgatgttggtttttgtaatattaaaggaagagagggagtagaggataatttgtagtgataagaagagattggatttagttttttggggaagaagatttttttttattttttttttttatgtttgtttattttttattttatttttaaatttttaggggaaagggagaggagagagatattgttgtttttttattttttagtttaagtatttattttaatagataagtaaattttatttgttattttttttatgtattttttttaaatgttttgttttttagttaggtttaaggatataatttttttggtttgtggttttttttcgttttgattttttgatgattgtttttaaagagttgagttttggtataattagatttgagggagatagtgtgagttagttaataagtatgtagtatttatattttgggggagagtttatatttttttttatttttttttttataaattattattttgagatagaattttttaaatttttttttattttaggaaaggaaaggaaattggataaggcgattttgtcgttaggttgaagtgtagtggtgtgatttcggtttattgtaatttttgtttttcgggtttaagcgatttttttgttttagttttttaagtagttgagattataggtatatatttttatattagtttaatttttgtatttttagtaaagacggggttttattatgttggttcgattggttttaaatttttgatttcgagtgatttatttattttggttttttaaagtgttgggatgataggtatgagttattgcgtttggttatttttttttatttttgaatttttataggttgttggtttttttttagttttgtgttttttaagttaagattagggggaatttataggtttatggttattttttttggggaatttttttaaaattttaagtttgtgtttattttttgatgggttatatttttaaaaagagaaatatttttatatatgatgatttggattaggttttttttaggggttttaatgtttatatttgtatttgtgtttatttatttatttattttttgagatagagttttgttgtgtcgtttaggttggagtgtaatggtgtgattttggtttattgtaattttcgttttttgggtttaagcgatttttttgttttagttttttaagtagttgggattataggcgtgtgttattacgttaggttaatttttgaatttttaatagagacggagttttattatattgattttgtgattcgttcgtttcggttttcgtgtagtggcgcgattttagtttattgtaattttcgttttttaggtttaagcgatttttttgttttagttttttgagtagttgggattataggtatgcgttatattagttaatttttgtatttttagtagagacggggttttattatgttggttaggttggttttaaatttttgatttaaagtgattcgtttgttttggcgtcgtggtttacgtttgtaattttaatattttgggaagtcgaggtgggtagattatttttggtcgggagtttgagattagtttggttgatatggtgaaattttatttttattaaaaatataaaaattagttaggtatggtggtaggtgtttgttattttcgttatttgggaggttgaggtaggataatcgtttgaatttgggaggtagaggttgtaatgagtcgagatttcgttagtgtattttagtttgcgtgatagagtgatatttcgttttaaaaaaaataaaaaataaaaaaataaaaataaataaataaaattagggagagaattgttttgatataagtttttggttaatgatgaaatcgtttttttttttggttgttttggtatggtttttatagtttgaggtataatggtgagagtaaatttaagagggagttaaagtgaggtatttaagagagggattttttttttttggagaattgtggtagtttaggttgtgtaggtagttggataagtaagattgaattataataggtttttatattttttattaggaggagaatttgtaatatttagtggagtaggttatattagttatatatgtaaaatgtaggataaattaaaggggtatagagttaggggagaagataatgggatgagattgttttagaattttattttattggtttattgttgggtgtggtggtttatatttataattttagtattttgggaggttgagatgggatgatggtttgaggttaggagtttgagattagtttggtaaatatagtagattttatttttttaaaaaaaaaaaaaaaaaaagaaaaatatacggtttatgaattagtagtatttgtattaattagtttattgaaatgtagaattataggttttataatagattttttaaattataatttgtaatttaataagttttttaggtgatatgtatgtatatttatgtttgaaaagtattaagattttttgatgaaggaggatttgaaaggtaatgatggatgtgaaaggaaaggtaaagagaagttttaggtagttatttaagggatagggtcggttggagagagagtttcgaggttttattttggagaatattttgtattgaatgagttttgaatataaagatagttagtataggagggtttgaagtttttagataaaaggttgttgttattattatttattacgatttttgttattttttattttattgttattcgtttttagtttttattttaggatttttttatattttgattttttgtttgtttgtttgtttgtttgagacggagttttgcgttgtcgtttaggttggagcgtagtggtacgattttggtttatcgtaagtttcgtttttcgggtttatgttatttttttgttttagtttttcgggtagttgggattataggtgttcgttattacgtttagttaattttttgtatttttagtagagacggggttttattatgttgtttaggttggtttcgaatttttgattttaagtgattttttcgtcgtttcgttttttttttttcgtttcgttttttttcgtcgtttcggttttttaaattgttgggattataggcgtgcgcgatgttcggttttttatttatttatttatttatttttgaggcgggaattttgttttgtcgttaggttggattgtagtggtattatttcggtttattgtaattttcgattttttggtttaagcgatttttttattttagttttttaagtagttgggattataggtatacgttattatgtttagttaattttttgtatttttagtagagacgagattttattatgttgttaggatggtttcgattatttgatttcgtgattcgtttattttagttttttagagttttagttgttaaagttggagtgtaatggcgcgatttcggtttattgtaattttcgttttttaggtaagttatttttttgttttagttttttgggtagttgggatataggcgttcgttattacgtcgagttatttttgtatttttagtagagacggggttttattatgttggttaggttggttttgaatttttgattttaattttttaaagtgttgggattataggcgtgagttatcgcgttcggtttatttttttttttttttttttttttttttttgtttgagacggagtttttagtttcgttttgtcgtttaggttggagtgtaatggtgtgatttcggtttattgtaacgtttgtttttcgggtttaagcgatttttttgttttagtttttcgagtagttgggattataggcgcgcgttattatgatttattaatttttgtatttttagtagagatagggttttattatgttggtttattttgatttttgagtagtttggttagttcgatcgcgttaaattttgttcgattttgtttagttcggttgttttggtttagtttagttgttaaggtttggagttttatggttgcggaggaaatgatgttacgtttaataggcgggttaattagattttttttttttttcgattggttgttaggaatttgattagattcggagtttcgcgggttttagggttagttgttagtattttttttagttgtttcgttttttattttcgtttttcgtatcgcgttttttttcggttgtttttttcgcgtggggtaaggtttcgagggtagtatttagtagttatttagttttggaaggagaggtgattcgaatggttcggttttttttgttattatgttaggtattttggtcgcgtaggtatttattgattcgatcgggtgttcgtagttggcgcggttattttaatcgtagggaattgtggaatttatagttttaaattatatgtgggtggaacggggaagttggagtagatttttggaggaaagtaaaattggggatttttaggattaggggtttgggttttagaagaatgggaaaggacgagaaaggagtttaaataagaattttgttattagtattgtttggttttttttttaggtgttgatttgaatttggtttatttttttttgattaaaattgtttatttatcgtggaagggattaagtatttatatggagacgttattagttaatataattggagaaaaggatattttttagtcgtaataagagtgggaaaagaattttcgggagaattttgatttagttatttagattaggtagtagtttcgagatttttttatcgaaacgtttgagttggaagtaagtttagatttagttagttaaattttagagtatatttaaggagttgaaaaattggttgttgaatttgaaggagatttttataagttttatggattaattagttagatgttagaggttttttaagtttttgatttttggtattgtttcgatgggagttttgttaagaagatcgtaattcgtggttatggtttggataaatttaaattaggtttttgttgtcgggtattggttttggggttttttttcggattagggtcgttagagggttggatagagttaattatgggcgtagggttatggagggaggaaatttggggggagtttatagagaaatgtttggagtttatgtgttaaggtgaggaagtagagttttagttgtttgggtattttggattttttgttaggtttatattggtattttttatttaaggtcgagatttttgggagttggagattagcgagaaggaagttttggttagggaagaacgtgtaaggggtatagaattatttcgagttgggaattttgaaggagttgttcgatgttatggacgggtttttcggttgtttttgattttatttttatttggttttttagaacgaattgttttttatgttaatttggttgtttgttagttgttgttagggtagttttagttggtagtttagagttgtgatcgggtgttggagcgggagtttggttatttaaaggttttatatcgaaggggggttgtttaggttgtttttgggaatttggaaaaagtaattgttgattttaagaaggtgttggcgatagattttaaaaatcgggtagtttaggaggaattggggaaggtggttatttaggggaagaattaggatgtagggttggtttagggtttgcgtaagatgtttggttgattaaaagttaaattttaaaagagataggaatttgtgaattgtggtttgtgttgtgagatttgggggtggggggttagagggaaggttttagtttatattttatttttagtttttggttttttaggggaggtagtagtggttatagtgcgttttttttgaggggtttatttattttcgaggatatatagaagttgtttaaattaaatttagtagtggttgggggagatggtggattttaatattgggtattatattttttaggcgttttattattggagtttgtttggcgtatgcgtttggcggtatggtattgtttggaagttattttttgttgttgtgtttttattgggttcgtttatatagttattcgtatttgttgatttacgtgtttagtatttaggttttttattggtcggtagagttttcgggacgtttttttttttgaaagagttaattgattagttggtgatggggagaggcgggttttgggaatcgttttttggttggggggtgggggggaaagatggcggagttgatgttgtttagcgagattgttgattcgacgcgtttttttatcgataatttgtttagttcggaggattggggtttgtagagtgaggtatcggggaggggagagggttgtggtaaattgtttttgaggtacgcgggaaagaagcgggggtttaaagaggaagtttgggtaaatacggaattcgttatttgaaggagagcggagtagggggttcgttgtgtattaagggggatataaaagttagggaagaattttgttttttgttggaacgtcgagttgtttcggggtcggggaaggaggggttgaagcgttttggttgtattattttttaagtgggcgggcggtgggtttggtcgagcggagttaatgagggatggggcgggggtttgtgtgcgatttgtaggttggggttatcgaacgatttttcgacgtttagtattttttgtagatagtattttgtattttggtttagatgaagtggtcgaggagtagacgtagttttttcgttgttcggagtaggatgtttcggtattgtgtttttagtttttttttaatttttggtgggtggaaagtgagtttagaatttggatttatttataggttataatttatttggagttatttttatttttttatttttttttatatttttgtttttttgtatttttttttatttagtttgacggtagttttttggacgtggggatggatgttagtttttttgagtttttatgggaatttttgtcgatttttttaggtaaggtagtttttgtcgtttttttagatttttagaaatttttatttttttattgttttttagaaattacgtagttttttatatttttacgtttttatataagtgtttatttttttttttttaattttttatttttgtttttttttttttgttgcggtataggaatttttatcgatatgtttttgggtattttttggattttttttaagttttgttttttgataatttttaatttttttttttttagatttttaggtgaagtttgagttattttttttttgttttttttttttttttagtttcgagttatcgcgtttttttatagagttatttagcgaggtgagagagttatattttttttattttttgtgacggggattttgttttattttttttattcgtgggtgataaagaaatgatttaaatgatttgtgtgttatgagttatgaggtgtgtgaggtgtggggggttttttttattatttttgtcgtttttttaatatttttattttttatattttttttggttatttagtagtgaagatttttttgtttgtttgttttttgttttttgtttttttttgagatagggtttttttttgttatttaaattatagtgtagtgatagggttatagtttattgtagttttgattttttgagtttaggtgatttttttgttttagttttttgagtagttgggattatagatatatgttattatgtttggttaattttttttattgtttgtaaaaatggggtttttttatgttgtttagagtggatttaaatttttgggtttaagtgatttttttattttggtattttaaagtgtttggattataggtataagttattacgtttgattttgggtttttttaatataaagagttatgtggggttgggaagaagagagttattgattgttgagaattttggaattgtttttgtttaagttgtttattttgaggttatatttgaagttatgagattttattaatttttttagaaataaagtagaaagaatgaataggttagaaagatggttagtattatttagattagaatgttaaataattgatggtttgtaagttttaaatttttaaagtttttgttttcgtttttattgttaatattttttttgttttttgtttttttttttgttttttgttttatattaatttttatttaggtttttggggtaggggaggtgttttatgtgaagatagagtttttggtatttttattgtgttttttgggagatgatttaatatttttatttgaaatcgtttagattaatgttatttttatttttgatgattttttaggtaataaaatagtttgtttttaatttttggttttattacgggagaatgtgttatgtgtgtgtgtgtatgtgtgtagatggaggggaagtgtaggtagtaggatagggagaaaaaggtggggaggggaaatggtagaaaattaggagggaaggtaggaaggagaggaaatattttagggaattatagtaagggtagtgttgaggagatggatattattttttttttttttttttgtttttagtattttgttatgttatttaatttattttttaaaaatttgtgagtagtttagggtatatgtatttgtgtgatttttttttatttaatattttattataaatatttttgttgttgttgagatagagttttatattgtcgttcgggttgaagtgtagtggtgtggttttagtttattgtaatttttattttttaggtttaagtgatttttttgttttagttttttaagtagttgggattataggtatttattattacgtttagttaattttttgtatttttagtagagatggggttttattatgttggttaggttggttttgaatttttgattttatgagtcgtttattttcgttttttaaagtgttgagattataggcgtgagttatcgcgtttagtttataaatatttttaaatatatagaaaggttagaatattatatattaaattagattttataattaatattatttgttttatttttaaagtgtttttaagtttatttattcgtagttgtgtatttagtaaatgtttattgatgtgattatatttgaggtataataattataaaaaagaaatatttattaagtatttattttatgttagatattgagtagtatgttgggaatgtaaagatgaataagatttgattattatgttgatttttaaattttgtgatttggtaatgggagaaagataagtattagttaatataggtgtggttattttaggatagaaattattagaggtggggttgggtgtggtggtttatgtttgtaattttagtattttgggaggtcgaggtgggcggattacgaggttaggagattgagattattttggttaagatggtgaaatttcgtgtttattaaaaatataaaaaattagtttgtagttttagttatttgggaggttgaggtaggagaatggtatgaattcgggaggcggagtttgtagtgagtcgagattacgttattgtattttattttgggtaaaagagtaagatttcgtttggaaaaaaaaaaaaaattattagagggtattatgaaagtttataagaggggatattttatttatattggcgttgaatttgggatgtgtttttggaagaagggttttttgagagttttaaaggatacgtagaaattagttaggaggatagtgtgggggttgatttgtgtttgaggattttgtatttttttagagtggatgtaagaaggatttggggagtgatgtggaattgtaggggttatagggttaggtggggtttttgttaaggggtttttagtttttattttgtggataggtgggggtttttggagaattaagtagggaagtaatatgattaggaagatgattttagtggtaaagtagagaatgggttgtagaggggtagggttagaggtaagagaattaaggaagaagtttatgtagttgattaagtaagatgttcggatgttatgaagaaagtagatttgagaaagaatgaagtggaatagatgagttgtgattttttggatattggagagaggtaggagttaaagaggtttgtggttaggatggttgtgggtgggtgatgttattgtttattggatggagattgtaaaagtaggggttttttggttagggaagatgatgaatttagcgttggatatgttgattttgttgttgttgttgttatggagttttatttttgttgtttaggttggagtgtaatagtggtgtgattttggtttattgtaatttttgttttttgggtttaagcgatttttttgttttagttttttgagtagttgggattataggtatgttttattacgtttggttaattttgtatttttagtagagatagggttttttttatgttaggttggttttgaattttcgattttaggtgatttatttattttggtttttaaagtgttgggattataggcgtaagttattatgtttagttgatatgttgattgttgattttaaagtattttttggattttttggtattattttttattggttgaattttaattagggagttcgttgatgtagtttatttagattttttttggattttagggagtatagtagggagggatggaaagtggatttggagggataaatagattatatttagtagattaatatatgttataaaaaagatatataaaataaggattgaaatattattagtaggttaggtatagtggtttatatttgtaattttagtattttgggaggttaaggcgggtagattacgaggttaggagattaagattattcgggttaatatagtgaagcgttatttttattaaaaatataaaaaattagttaggtatggtggtaggtatttgtagttttagttattcgggaggttgaggtaggagaatggggtgaattcgggaggcggagtttgtagtgagtcgagatcgtttattgttattagtagtaaaaggattgtaaggattgttggtggttttgtattgtatagtgttattagagttagatttttttttatatttaggtattttttgagggtttgtattttatttttaatggatatgagatatagtttttgtttttggagagttttgtgagggttataatatattatggttaaatagttttttttttttttttttttttttttttttgagatagagttttgttttgttatttaggttagagtgtattggcgtgatttttatttattgtaattttcgttttttgggtttaagttattgttttgttttagtttttttaatagttaggattataggtacgtgttattatgttcggttatttttttgtatttttggtagagatagggttttgttatgttgtttaggttggtgttaaatttttggttttaagtaatttatttgcgttgggtgtcggttttttaaagtgttgggattataggcgtgagttattatgtttagttatggttaaatagttttgatagtggttatttttgtgtagggaatttgagtgattggaggatcgggaagggaagttttttttttttttttttttgagatagagtttcgttttatttaggttggagtgtagtggcgtaatttcggtttattgtaagtttcgttttttgggtttatgttattttttttttttagttttttaagttgttgggattataggcgttcgttattacgtttggttaatttttttatttttttagtagagacggggttttatcgtgttagttaggatggtttcgattttttgatttcgtgatttatttgtttcggttttttaaagtgttgggattataggcgtgagttatcgtgtttcgttaagattttttttttgatttaatttttttttgttcgtttggatttgtattatgattgtattatttatttaaaaatataaattgaagttttaaaaagtaattttagtgattatataattaagtattaaagtgaacggtatggattagaggtagtggtggattgttgatttgtgggttgaatttggtttttagaagggttttattttatcgatatggggtttagtatttttttttatggagtgattaataagttataaaggtagatttattggaggttatggaggtttagaggtgattgaggttttgttgtttggtgtttgggaggaaaatttgtgtgacggggtaattaggaagttttatttatggttagttagatttgggtgattggtgaggtatgagaatggaagggattagtaggtagtttggaagttagaatttggtgtaggtgagtagttagggggagatgtatatttggcggttgttagtatggagatgtattgggtagggataaggtggaaatttagtaagataggaatttgggttatgtgaatgttggagatttttttgttattttttttgtttaggtttattttatgtgaatagataagttttgtgaataagaaagagggaaacgtagaagggtaaagatagttttgaggaatatggagtagggatgagaaaaattagaggagttattaaaggagaaagggaagtattaggcgaaaagcggggcggagagttagtaggtgagtagttttgtgattgttttttttggatggtttgtaatttagggttagaagagttttatttttaggtttaaagagaaaggatttatttttttattttaatttttttttttatttttttgagatggagttttgttttttttgtttaggttggagtgtaatggcgcgattttggtttattgtaatttttgttttttaggtttaagcgatttttttgttttagttttttgagtatttgggatatagggatgcgttattatgttcgattaattttgtatttttagtagagacggggtttttttatgttggttaggttggttttgaatttttgattttaggtgatttgttcgttttggttttttaaagtgttgagattataggcgtgagttattatgtttagttttttattttaatttttttaattttttagtgtttatatgatatttagtttttgttttattttgttttttatagatgtttagattaagatagaatttgtttttttatgttttttcgttaattttgaggtttttttgtttttagtcgatttttttagttaggtgagtattatttttttttttttttttaggttttttagtgagttttttttgatttagaggtatgagagtttttttttttttagtttttttttttcgatattttttttgattaatgtatttttggaatgttttatataggtttttataggagaggaggttttggaagtgaagatagagtttttgttttttttaggatgttttttgtgggatgttttagtttttttatttggagttgtttagattagtatgggtttattttttgatggttttttaggtaatggagttttttgatatttggaatttttagtgagaggtttttggttttgatattttttgttttttttttttatttttttttaggtaaagttttgtttattcggaagtcgttattgtagtttaaatttgtagtgttaattattgttttaatgttatttagagttgtgttttttagtattatagtttttttgtagtttttcgtttagttatttttaggtattgaagaaggagaaaagggtcgggtatggtggtttacgtcggtaattttagtattttgggaggttgaggcgggcgaattatttgaggttagaagtttaagattagtttggttaacgtggtgaaattttgtttttattaaaaatataaaaattagcgtggagtggtggtaggcgtttgtaattttagtttttcgggaggttgaggtaggagaattatttgaatttaggaggcggaggttgtagtgagtcgagattatgttattgtattttagtttgggcgataaagcgagattttgttttaaaaaaaaaaaaaagaaaaaagaaaaattaaaaaataaaaataaaaattaattaattaattaaaaaaaaaaggttaggtatagtggtttacgtttgtaattttagtattttggtaggttaaggtaggcggattataaggttaggagatcgagattattttgattaatatagtgaaatttcgtttttattaaaaatataaaaaaattagttaggcgtggtggcgtgcgtttgtagttttagttgttggggaggttgaggtaggagaatggcgtgaattcgggaggcggagtttgtagtgagtcgagatcgtattattgtattttagtttggtcgatagagtaagattgtattttaaaaaagaaaaaaaggagaaaaggaggcgggttgtattgattttgttagagagtttgtagttattgaggttgtttaatttttgggtgtttttgtgtgggtgtggatataaggattttatttagcgtatagttttttgatttttgtttatttgttttagtgtttttagttgtttttatttagggtgttattcgagtttagtttgaagggtcggttttttttttattacggtttgagaggaagagtatcgttttcgtttttatgtttggaaatttttgttcgtttgaagtggatgtaagtgttggggaggagagaagtagggcgagtgatgggaagggaagagggaagttttgttatagagagaattgtgggatgaggagggagtcgatatttaggagaaaaaagtgaggaaacggatttattagattattttgagggttagaatggatttttgtttttatatgaatattaattttaggtagttttagggttttttaggtttgttgttattgtagatggagaaatggggttggtttttataaattaaaggtaaggaagtcgtattgtattatacgattacggttatggttatagttggggagggaggttgttttttaggggaaaattaggtaaattgtataagtagtataataaggttaaattttgaattttataaatgtgggttgataggaagaaagagttacgaaggaaagagtttttattagtatggagaaagttttttttatattttaattttttttatttttgaggagtagtagtagggaatgtttgaaagaagggttttttttttagcgtgtttgagtagagaggaaaaatttttttggttatgtaggtgggttaggaaggtaggggaatggttatgtgagttttgggtaaattattttttggggtttgagagtatagtttttttttgttaatttatttgttatttttttttgatttttcgggtgtttaggtaaagttgttgaagcggtagtagcgaatgattaagaatcgggagttagtttgttagtttcggagaaagaagaaagagtatttgtagggattggaggttcggttgtaagtagtattggttgataattagtagtttcgtcgagagaatgttgtttttcggcggcggttggaggttttgttggttgaagtaagattagtttgtttttgggagattaataggaatatagtttttttggaatgattttttttttttttgtttttttttttgtattttagaatagcgagtttaagttagggtttggaaataggaaggtggtttgtattatggttttttttttttttattgtttttaattttggatttgttaggtgagattttttttgttttattagaattttttaggtggagtttacgttatagttttttagttgtttgttttggtttaggttatttttttttgtttatatataaatggttttggtgtttttggtatcgatgatgtgtttggttagtttttttttgttttattatttgttttttttttttggagatggagttttgttttgttgtttaggttggagtgtagtggtacgatttcggtttattgtaatttttgttttttgggtttaagtgatttttttgttttaattttttaagtagttgggattataggcgtacgttattatgttcggttaattttttgtattttttagtagagatagggttttattgttgttgtttaggttggtttcgaatttttgagtttaggtagtttgtttattttagttttttaaagtgttaggattataggtttgagttatttcgtttggttttttgttttattatttttttagtggagagtagatgatggtgataatgttggtagaaatagtgattattaagtgtttattgagttttaggttttaggtgatgtattgttttttttgtatgtagggattatttttatttttattttatagaggtagatttaggtttgtataatagattgtaatttaagtagtttatttgtagagtttttatttttatttagatatttgatatagttgaaattttttattgtgtttagtttttttttatttatagtattagtgagttttttttagtttttattttttttcggatgaataagggggagttttaatttcggagatatttgttggggtttttagagtaagagttagtttagggagttgaatttttttaggggtttttttagggttttaaggagttttagtttagttttatagattagtttagttttaggtgaggagagagagagagggttttttttcgtttgaggatatgagttggtttttttttcgtttttagtgagggggatttaaagtttttttttgtcgttatcgttttttttgttgtgggagtgttgggtagtttttaagtgttgttttttttttgttttattttagtaatttgatagttttttttgggggcgttaaggagttattattaagagatttagattagtttttttttttttttgattgtcggtattttaatcgtattgagtttttgaggtgtgggatttattgttggggtatttagttttttcggttttttaaggttttttgtagttagtttggttggtttgtgtattaaagcgttagtgttttttgttttttttttatttttgtgggtgggtaaggagggtgggaattttggtttggtatggaggttttgagtttttttatttttttaggtttgttgacgagttgagtggttgggtttagcgttattagagaggtcggaggaagattttttagagggtttaggagagataggtagggcgggtggttggtttaaggaaggttatttgaagataagggttaaaggttttgtttggggatttttagtgggtatttcgttgtggaagtttgagggatcgtttgaaggaagtggagggttgagtgggaggtggtattagtttttaggggttgtttgttttttttttttttttttttattttttttaagtttttagatatttttttttttagaagttttagttacggaagaagttatttttagttaaggtagtttttatttaattttttggatttttagaaaggtgagtgtggggtggggtgtttatttattaagtgaaattttatttttaagagttgtatttttagtagttgttttgtgtttgttattattgttattagtgggattatattttttttttttattgggggttttttgttttttttttttattttattcgtttttttggtagaaattgagtattgggtttagttttttttaaattttgtttttttatttgtttagggattttgtgggttagttgtaattatatcgttatttagatcgttcgtagttagtatttttggatgtaattgatcgacgggaagatatattttatgttgttttttttcgaagggtgagttttttttgtttttttatttttgttattttaggtttttagtagtttgtttttagtggggggatgtagagtagggttggggagtttgttggtatttttgtttttatttttttggtttggtttatttgttttttaggattatttgttgtttttagttattagttataataagatttttcggtttaagatgtttttggtgatgtttgttatggtttttaatggtaattttttttttgttgggtatgggggtagttttaatagggagatttagtttgggagttgagggggaagggggagaggagtagggtatttagagagttgttggatttataggtgagaagtagtaggaagtaggtggagggaagagtattatgtaggagatttgggagggagataagggtgagggtttttttttggtgaaggtgtttgggtagatgattgggtagaggcggggggtcgggaatttgttagatttttatttattttttttttttgatgtttttttttgtgtgattttatatttaatgtttttttttttttttattttttttttgtttttgtattaaattttgtttttgttattttgtttaattttcgttatggatttgtttttttattattgttttttttttttttttttgtttatttttatttttttgattttttttttttttttttgtaatttttgtttgtttttttatttttttttttttaatttttttttttttatagagattttgttaggtcgtggggtttcgggggattatgaggagatgatgtagatcgagtgtgaggttatggatattagggtgatttatattaagatttttatagtgtttttttcgtttcgaaaatagttatttttaattttaggtaatgttataggtggttttttgttagtttttgtagttagttaggtttattaggttttttattagtttttttattttaattatttttgatttttgttatttatattgatttagaacggggggagggggtattaggtggttaggtgggattgttttaaatttttttgatttttaggtttggggtaattggtaaaggaaagagtaggtgtgggggttaagtatttatttgaggtgggggtgtttatttttttttttatttttttttagaatatagggttttttttatttttgtgaatttttagttttggtttttttgtttgaggggattgtgtgaggtttagttgtggggtgggtggtgagttgttgtatattttttattttgtttttttagtgttatggtagtggaggtgggaatttagtttttaggtgggataagggaagtttttttattttggagttagttattgggagtaagggagggtggggtgggggggagtttaggtttatgtgtgtgtattttttttttattattattaaataaataatttggagggagttgaaggaatggtggttgtttttttggttcgtgatggggagtttgggggaaagtggtttttttagagttagtattaaagaattaagtattgaagatatagttggttttgaggtggggtgggtgcgggattatagatcgtatgttatttttttgtttttatttttgtaattttggggtatatttgtgtttagtaacgatgttttatggcgtgatagattagaggatacgtatttttggaatgtgagttaataggaaagatggggttttacgttttttagggtgagtagtttttgggttttttgttttcgagtaggttttttttttttttttgttgtttaggatgagtagtttaaataaataataagagttggggttagaggtttagagtttaggaagtgggggtttcggtgaagaaggggtgatatttggaagggaagggggatgtggtaggatattttttaagttttaaattggaggggattgagatttgagagtttagatgaaagataaagataagagtggggtaggtagaaaaagttgtatatttttatgtttttaattttttttttttttttgagacggagttttgtttttttatttaggttggagtgtagtggcgcgattttggtttattgtaattttcgttttttgggtttaagtgatttttttgttttagttttttaagtagttgggattataggtgtacgttattatattcggttaatttttgtatttttaatagagatagggttttattatattggttaggttgtttatttcggttttttaaagtgttgggattataggtgtgagttattatgtttggttaggttgtgtattttaattaggaggaaggggagtaggataaagtgagggattgagtttgaggttaatttggaagaatttttttttagttgtttttgtttagtagtgttttaggtttgattttgtaggagtgttttgggttagttggagggtgtgagttgggtttgggtttaatgtttagatgattggataggggttgtttgggttataagtttaggtttgaaggagggaggaagaattttatgtgtttagttaggtaatttttatattttttttattgtttttatttattattgtgtttggggtgaaaatagattaagtaattatggtaatttggaattagggattttaggaattagattttttttttttttagagggtagtttagttttttagttatgttttttattttagagtttttgagttttatttatcgtatttttggagggggtgtagtgagaataaggattttggaagtatattatttaagttggattttttattttgtttttcgttagtagatgtttttaaatattttgagttttagtttgtttatttgtaagatgggatgtttttattttttaattagggttgatgataggatgaaagacgacgtttttagtgtttggtttataatagatatattttttttttattttttgtttttttttgtttttatttttgttgttttttttttttttatttttattttatttgggtttattattgtttcgttgttttattgttttttttttttttgtttttagttcgggaaagtatttgaagtgttggtattttaggggttattttggggtgggatattttgtttttttgttgattggtaagggatagttggtattttggtgtggatgagatattagattttttttggttgagggattgtggtggtaggaaggattgagaaggacggtgagtgggtatttgatgtagggtgaaagtcgggtaggttttgggttgttgttttttaggtttatgtggatttttatttttttggttatatttttaaggttatttagtatgttaggtcgttgttatttttgtattttattggttttttttgttttatgtttattttgtttttttgttttgttttttttgtgttattattttttttattttttttttaggattttattttttgtttttttttatttttgattttattatttttttttttttttttttagattttttttttgtttttttttgttttttattttattagtagttattataatttttttttgaattattatttattattgtttttttttttttttgtattttttttattttatttattgttttattgttttaaattttttttttaatttaaaaatagaagtggggtttcgttatgttatttaggttggttttgaatttttggttttaagtagtttttttatgttggttttttaaagtgttaggattataggtatgagttatcgtgttggttttatttaaaaatatatatatatttttaaatttattgttttttttttttgttttttttggtttttttatttgttgttgttgttgattttgtgtttgtttttttttttttttatgtcgttttttttttattttttattttgttttttcgtttatattttttgtttttttttattatgttttttttttttttttattttggtttttttttttttttttttttttttattttttttattttttatattagttttttattttttttttagttgtgggggttagtattggggagtttgatgtttgttttatcgttttgttatggtttttggatatagtatatttggatttcggggtttagatgtgtggttgttatagcgatttgggtttttttggtaaatataggcgtttattcgttttagagtagagaataaaataattgtgtgatttttttttgttacgagatagaaatgttttttttttttttttttttttatatttatgtttttaggtaaaggaagttttaagggtttaaatttttttttttgaggtttttttgttttttttttagttgtagttttttagtttttttttattttttattttgcgttttgtttttatattttgtgttttttatttttattcgatttttagtttttaataatggaatgttgattatttttttttttatttgatgttattttttttaagtgaatttatataataattggatgtagaaaagttttaaaaatttggattttttatttttttttgtataagtgttttaaagaagttattttatttgttttttaagtttttaattttttttttttttggagttgtttggggagaagagcgaatataggtttaggaatgagaatatttgggtgagatttatttttattattattgatttagttttttgaataagatttttaatgtttatgagttttcgtttttttagttataaagtgggattaatgttcgtattgtgtaggaaattgttttgtaaacggaagttcggtataagtgttttttattttttttttttttgggattgtttttttggatcgtagtttttggtattttttgtttttttgtttttattttttaggtttttgtttttaattgtttttatttttatgtgtttgtttttttttttttttattttttttttttttttttttattttttattttttttttttttgaggttaggataggaatttggaggattatttaaggagggaggtttagagttgaagatatagggattgaggttatagagaatagtcggagtttgtggatagttttggataatattgatttttttatttattattatttagatattttagtgaagttaattttagttttgattattgggtttttttgtttttacgtttgggttttttattttttttttttttttttttttagtttttttatattttagtgttgatttgtatttattggttatttatattgtgtaaggtttggtgttttttttataagatgtgaatatataagatatgagtttttttatgagtttggaaattaaagggtgaattaaatggtaaataaagataattttagaatttgaaattatatttgttaagtttttagtggtttttttaaatgttttataagtttgtgtatatttggaattttatatttttttttgagattttaatagtgggtttttagaatattttaggattattttttttgttgttttttttgaggtttttggttattttttgtgttaaatgtatttatgttgattattttttttaaataataaagttaggatatagggtataggtatacgcgcgtgtatatatatattaaaggatatgattatggaatagaaatttgaaggtgttagaggaaatttatattttgtgttttgttttttgtgtgatattgtttttagattttttttttttttattattgtagggttttttattttttgttaggagatttttgggaagttgttatttattgttggttttgggggttttaggttaaggtagaggaaggaagttgagtttggttttgtttaagatgttgattttattttttttattaaagttaggaaaaaaatagttatatatatttagatatacggatatatacggggatatttacgtaaaagtttatgtgtgtttttgttttcggttatatggagtttattgggtatttggttatagttatatgtagtgtaggtacgttttgatttaggaatattatatatttgttattatggggatttgatttggtgtgtagatatttgggtcgttatttatgtggtagaattaagtatatatgggtttttttacgtattttttattcgtgatttggttaagttatattttagtggtgaggtttgtagtaggatagagagatttagtttttattgtgaagttgggggtagtgggtttttatttagttgggatattttttttttgtagtaaagttttttttttagttttttgttagggtagtatatggggagatgaagttagggaaatatttaatagatttatgtggggtgtgtttgtttttttgttttttttgttttttggttgttagttttttgtttgggattagagatagcgtgttcgttttttttagtttttattttttttcgtttttgtttttgttttttcgtagtatttaggtattagttttttattttgttttttattattttattttttatttaggtgatttatttttatatttgttttttgtttttagttttttttttaattttaaattttttttttaatttttaggttttttttttttgttcgttttaattttagttttttttttaaggtttgtatgttttagtgtttatttaagtttttgttttgttagtgtttaagttttatttgttttttttttagggatttgttgaggtaggagaatgtaaagggggtagtgataggagagggattgaatagaatagatagtaggagtggttcggggacgggataagtcgagaagatagaaatggtgggattggagtagggtggggatttggggttttagagacggttttagttggagaaagaggttgttttttgttttttgttttttgtttttgttttttgttttagattgttaggggagaattggtgagaggatgagggagttagtattgggtgatagatatggggtgcgatttagagatttaagttagagtagtggttgggaagagatgggagaggagtatgggggagggaggggaagggggttggttatgaggaaggatataggttgagaggaaattattggggttagagaggaggggtagtaggtggagaaatggtggggaaaaaagaaatggtaggaagggtggggggtgttaagttgggtaaaaattagggtgagttaaaaatggtatagggaaaggacgtgggaggtaagatcggggttgggggttgagatgagggtatggtgagatagtgatgttagatagggagtgggggttggggtgggggtaggagaagaggaggggtggtatgtgggagggtttgggaggggtgggaggatttgttttattttcgtttttttttttgattttattttggttttttttttttttttttttgttcgttgtagattttttttttattgtcgttgtcgagatttatagtcggttgtggtttagtttttgttgtaggggataagtgagggagatttttttgttttgttttgagacgtcgttttttcggggttggggatagagtaggtgtagaggtattgtagttgttcggttgtttaggtaaggaatagagttttggggagatttagaaggagaggtaagggatttttcgtttatttttatgttttaggtgaaggtgtggtaggtgagtttttagtagtgtttttagagtaaggatttttgtttaggatagaggatataggagtattcgttgggaattaggttttttgtgaaggagtgtttgggaggagagggtggtatgtgtgtgttggggtgggtagtatgtgttagggtttggatgggatgtagataattgagaggggttgggaataaatcgagggatttcgggagttagatggtggaattagggtagaggtggttattggtgaggtgagtttttgggttttggaggtgttggggttagcgggaagataggattaggttgaattggtggttagttgaattttggaaggaaagtgtttgcggaattttaaatgtcgggttagagtagttgagtttaggttttgggggttttaggttttaggaggtgttagagggtgtttttttgggtatttaaatggggattttttaggtggtagcgtgagagttgtagggagggaggtttgggagatttttttaggaaatattgaaatgggatagttaggattcgggtttgggacgtgtatagagtttgtagagaggattttaaaatttgtttttggttagagttttgtatttatgatttacggtttagtagggttgggatggttgagagatgtttttgggggtataggggtttcgtttttattttgtgttttttttaggttttttttgtttttgtttgtttgaattcgtatttttttttatttcgtcgttttcgttttttattattagtatacgtgatacgtttcgggtgggaagggcgggttttttatttcgtttggaaagaatttaatggtatagaaataattggaagtggaattgagaggaattattgggaagtaattcggaaatattatagttgttgtttgttttgtttttgtttttcgtatttttagtttttttttttttttttgattttgtttttaagtttttggggatttagtattttaattttttaaattttttttgtttattttagatttagttattaggtgtaggattagaaattgtttttttgttttttattgtatttttaattatttttagttggggtttggaaatttttttttttaatttttttatttttaggtcgattagttttttagaataaggggtatttggattttttaatttatttttttttgatattttttttttatttggttttagtttaatatttgagatttttatattttttttttagttttatttttagaatttttttatttttattttttattgttagatttaattgagggtgtagtaggagggttagagggaggtatgggggtaggattagaatttttatttgtggaatattttttatggaagttagtttttttttttattttttgggatttatatagtttttaatgagtaaagtgttaaagttggttataatataaaatatttaggaagttgagttatagtttgggaagatgtttttatttttgttagttttttaattgtggggagggtgttaagagggtgaggttatatttttttttaaatatatattatagagaattattttagatatagtggtagggggaatggtgaaggggagatataagagatatttaattttttgtttgtttagtatcgagagaagagtagaattattttaggagttggaatggggagttggagggttgggtggtggtaatagggtagggagggagattgggaaggagtttttgggtgtgtggttaatggaggttgttttgtttttttagattaattttattagttttttagaaaagttggtgagttttttttatttttttttggtgtaaagattttttttgtttttttttattgtgtagggaaagatgaggaatttatttatttggggaggggtattggataatttatagaggtttttaggggtacggggaagtatggtggaggttatgtgttcgttgttttttattgggaagggttttttgttttgttttttttatattatttaggtttttttatttatagagttgttttcggagttaataagaaattagtttttttaggtattatttaatgattaggtgtggaggaaatttgaaggggagattgggtgtgtgtgtacgtgtgtgtatgggtatttatatgtgtatttataaggatgtaggttttgggggtggatttgtgtgtttgtgtaggtatgtttgtatttgtggatgagtatatattaatatatttgtaagtgtatatgtgtatatatttttgtgtaagtatttttagggtgtgggagtgattagtatggttttagatataaagtgataggatttgagggtcggttagagtttattttttatttaaggttatattttaggttgatagaagggttggggagataggaaagggtagttttttgtatgttaggtttttcggtttgggtttttttgggtggggagttttttggtgtggaaatattttgtttttgtttagtttttttttcgttttttgttggttggtagtagaatgtgatggttggtagttttaattatttttttttttttgatttaggagaaaagtttaagagtagaaagttagaagatgtgtgcgtgttgggtggaggtgtgtgtgtgttatagttattttcgtttattagtgatatattttttattttttatcggttagtatttttatatttattttgttttttttttttttttagtttttggtttggaagagttgggtattttttaatatttttttttaattttttattttagttgaattttgattggtttttttatatttaggtttgttatagttttgttttttgttttattttgggatttttttattatttttttttttattttttgtttttgtgtgttttttaatttttgttttagtaaattttataaatatatataattgggtaatcgttatttagattaagaaataagatatttttagtattttagaagtttttcgttttatgtttttattagttattatttttttaagagtattatatttttgatttggagtattatagattaatgttgtttttttttaaattttatataaatagaattgtgtagtatgtttttttttgtgtttggtttttgtttaatattattttagtaagatttattatattattgtatataattatagtttatttttgttttattttattttacggtgtgaataaattataatttatttattttattgatgtgaaatgtttgagtagtttttagtttggggttattatgagttatgttgggtatatttttaggagtggaattgcggggttatagggtttgtatgtgtttatttttagtatatttagtagattttgttaaatagttttttaaagtgtttgtattatttggttttgttaggattttttttggtttggtttttgattttgttttagttttggtggttgtgtttaattaatttttagttttagatattgttcgtggttttagttttgattttggttttgtttttggttttagttttaatgttagttttgcgtttatattgaattttttatttatttatatagtcggtaaatatttattgagtattagttatgtgttagatgtagggatatagtagttaagaaaaaaaaataggtgttatgtttgtttttatggattttatagtttagtgggtaagaaagtaataaaataattttatagtatatttattattattttggattttaaaaaaatatttgtttatatatgattgtaaattgttataaacgttatatatgagaatggtatgatgttgtgatattatatgataggaggatttgatttggttaggaaaatttttttgtgaaaaaaatggcgggttgagatttgaaggatgagaaggttaagagagaagggaatagtgttttatacggatggaatagagtatataaagatttggggttggggatgggtatagagagtatgagggatttgaaggttagtggagttggaatggagggagggagggaaatgttatgggtggtgaagtgggagtaggggatatatgatggtagggttgtttgttagtgttttaagagaatttggaagggagatattgaagtattttgaggatagggatattttgattgcgtttgtgagattgtagagggtaagagtggaagtagagggaagggttagggttggatatagtggtttacgtttgtaattttagtatattgggaggttagggtgggaggattgtttgagtttaagagtttaaggttagttcgagtaatatagaaagattttgtttttgtaaaaaaaattaaaaattagttgagcgtgatggtatatatttgtagttttaattatttaggaggttgaggtgggaggattgtttgagtaataggaggttaatgttgtagcgagttatgatcgtattattgtatattagtttaggtgatagagtgagattttgttttaaaaaaaaagaaaaaaaaagtagttaggaggtaattgtagttgttaggtaagaggcggatggaagtttggattagaatgaaggtaagtgggagagaaggaaatgaattaaagagatgtttatgagaaaatataggtagatataaggaaatatggtagttttgaatgggttattaggtttttggtttgtaaagttggatgaatggtggggttttgagttttaatggggaattttgggaggggatgggatataggaaggtgatcgtgagtttaggttataggtatggtgaatttgaggtgtttaagtggagatgttaagtaggtaggtggatatattgttgtggagcgagaggaagatgattggggtgttttataaattggtgtatagtttggaaattgaagttataagtttggatgaaggtattaggtggatgattagagtagtaggtttattaatttagtagaaatttgttgtatattataattatttggggagtttttaaaaatattgagtaaaatttatttatttggtcgttttagttatattttaagtgttgtagagttttatattttttttggttattatattggttagcgtggatatagaatgttttaaaagagaagggttaggtgtggtggtttatgtttgtaattttagtattttgggaggtcgaggtgggtagattatttgagttgaggagtttaagattagtttggttaagatggtgaaatttcgtttttattaaaaataaaaaattagttaggtgtggtagcgggtgtttgtagttttagttattcgggaggttgaggtaggagaattatttgaattttaggaggtagaggttgtattgagttaagatcgtgttattgtattttagtttgggcgatagagtgagattttattttaaaaaaaaaaaaaaaaaaaaagatgcggtgaattgtgtttagtgattttgagagaagttaaaggttaagtaagatgaagataaatgttttttagattttgtggtatcgaagttattgggaagttttagagggagttgtttggtgggttggagggagtagagtggattgaggtatgtataggttataaggaaatgtaaatattaaatataaataaattttgataattgtggttatgaagtagaggagagaaatatgtggtggttggagggggtgtgagattggggataggttttttaaggttttatttttttttttttttgagatggagtttcgttttgttgtttaggttggagtgtagtggtataattttaatttattgtaatttttgttttttaggtttaagcgattttttcgttttagttttttaagtagttgggattataggtatttgttattatgtttagttaatttttttttattttttatttttagtagagacggggttttattatgatcgttaggttggttttgaatttttgattttaagtgattcgtttattttggttttttaaagtattgagattataggtatgagttattatatttagttatggtttaatttttatatagtaaaatgttaaagttttaagtgtgtagtttaatgagtttttgaatatgtatatatttgtgtaattatttagattaagatataaaatatttttagaaatatgatttttttcggttaataatttttataagtaatttgattttattttttaaaagtaaagattaattttgtttgtttttgtttgtttttttgtttgttttttgatatagagttttgatttgttgttaggttggagtgtagtggtattattttggtttattgtaattttcgtttttgggatttaagtaatttttttgttttagttttttaggtagttgggattataggtgtgtgttattatgtttagttaatttttgtatttttagtagagatagggttttatcgtgttggttaggatggtttcgattttttgatttcgtgattcgttcgtttcggttttttaaagtgtcgggattataggtatgagttattgtatttagtttttgtttgtttttgaattttatataaacggtattatttagagtgttttttttttttttttttttttttttggtagtttaggaagggtatataagagtataagagtattttttttttgtgtgtgatattttttatttagtattatgtgtgtgaaatttatttatgttgtatgtagtaatagggtgttttttattgttgtatagtattttattgtatgattttggtataatttatttatttattttatgaatggatatttgagttgtttttagttttagttaatataggaataaattttatgaatattatggtttacgttttttggaagaattatgtagttatttttatcggatatttagttatagatatttgggttatagattatatgttttagtagatattattaaataattttttagtgtttgtattaatatatgtttttatttgtaatagatgataattttagttgttttatatttttgttaatattaagtaatgatagtttttttgaagagggataagtattttggaggatatttagtggtattttattgtggttttaacgtatatttattcgataattagtgattttgtgtattttttaaaatgttgtttggatttgggtgtagtggtttatatttgtaagtttaattattgtggagggtgaggtaggaggattgtttgaggttaggagtttaaggttagtttgggtaatatagtaagattttatttttataaaaaatttaaaaattagttaggtatggtgatgtttatttgtagttttagttattttggaggttgaggtaggaggattatttgagtttaggagtttgaggttgtagtgagttgtgattgtgttattgtgttttagtttgggtgatagaggtagagtttattttaaaataaaatgaaatagggtgggtgtggtggtttatgtttgtaattttaataattttgggaggttaaggtagattatttgaggttaggagtttgagattagtttggttaatttggtgaaattttgtttttattaaaaaaaaaaaaaaaaaaaaggttgggtgcggtggtttacgtttgtaattttagtattgtgggaggttaaggtgggcggattacgaggttaggagatcgagattattttggttaatacggtgaaattttatttttattaaaaatataaaaaaatgagttaagtatggtggtgggcgtttgtagttttagttatttaggaggttgaggtaggagaatggtatgaatttggtaggtagagtttgtagtgagttaagacgtattattgtattttagtttgggcgaaagagtaagattttatttttataaaaaaaatgagttgggtatgtggcgtatgtttgtattttagttattttagaggttgaggtaggagaattatttgagtttaggtaaaataaataaaatgtttattggttttttggttatatttttttttggagtatttgtttgttttttgataatttaaaaaattaggttttttgattttggtttattttgttttgtagagattttttttttattttttttttttttgagatggagttttatttttttttttaggttgaagtgaagtggtatgattttagtttattgtaattttcgtttttagttttaagcgatttttttttttagtttttcgagtagttgggattataggtgttcgttattacgtttagttaatttttgtatttttagtagagatggggttttattatgttggttaggttggttttgaatttttgattttatgattcgtttattttagttttttaaagtgttgggattttaggtgtgaattattatatttagttgtttttttatttttttaatgatgtaatttgatgatttgaaattttgttttgttttttttttttttttttttttgaaatagagtattagttttgttgtttaggttggagtgtagtggtatgattatagtttattatagtttcgattttttagatttaagtaatttttttattttagtttttgagtagttgggattataggtgtattattacgtttagtgaattttttttgttttttgtagagatagagttttattattttatttaggttggtttttaatttttgggtttatgtaatttttatatttaagttttttgaagtgttgggattatagatacgagttattgtattcggtttatggttaggttttgtgtgtgttttatttaagaaattttgcggttgggtgtagtgatttaagtttgtaattttagtattttgggaagtcgaggcgggcggattgtttgagtttaggagtttgagattagtttggttaatatagtgaagtttcgtttttattaaaaatataaaaaatagttgggtgtgggagtagatgtttgtaattttcgttatttaggaggttgaggtaggagaattatttgaatttgggagacggaggttgtagtgagtcgagatagtattagtgtattttattttgggcgatagagtaagatttagttttaaaaaaaaaaaaaaagaaattttgtttattttaaggttagaaattttttgtaagatattgttatgaaagatattgttttattttttttatttaggttttgggtttattttaaattaatttcggtatattagatataaggtggagaatgattgtttttttttttttttttttttttttatttagggatgttggattgatttagtattaggaattaaaaagattattttttttttttttaattgtaggggtatttttgtcgttaattagttgattatatatgtgtgggtttgtttttgggttttattttgttttatttgtttatttttgtatttttaaaataagttttgatatttgattatgtaagttttgaggaagaggatttttgtttttttttttttaattggagatatttgagtaaggatttagttgagagtgaggagttgaataaaaaagagagagaagttaagtatggtggtttatgtttttaattttagttatttgggaggttgaggtgggaggatggtttgagtttaggagtttaagtttagttttaattagggggttgagtaagattttgtttttatattagaaagaggtcgtgcggtgatttatgtttgtaattttagtattttgggaggttaaggcgggtatattatttgtggttaggagttcgagattagtttgtttatatggtgaaattttatttttattaaaaatataaaaattagttgggtatggaggtgggtatttataattttagttatttaggaggtcgaggtaggaaaattatttgagttaggagatagaggttgtagtgagtcgagatcgtattattgtattttagtttgggcgatagagtaagattttattttaaaaaaaaaaaaaaaagtgagagagagagggagaagataatttgtattttttttagaagatagtaggagttgggatttaggtgtttggggaaggattggttttaggtatttatttattaatttatttaatattgatgtgttagatagaatatttatgtgttagatataagtatatagtagttttgggatagatgaggtttttgtttttatggagtttttattgtagtattgagagaaaggtaataagtaaattgataatttaggtagtagtaaatgttatgaagaataggaataggatattgtgatagagagtaatggaagattgttttaattgggagttaagatttgaagatggagttagtttttatgagtagagtgaagagtattttagatatagggaatatataatgtaaaggtttttggagtagtgagagtttgtagtgttcgtgggaaaaataaaagattagtgtagagtcgggtgcggtggtttatgtttgtaattttagtattttgggaggttgaggcgagtagattatttgaggttaggagtttgagattagtttgatcgatatggagaaattcggtttttattaaaagtataaaattagttaggtatggtggggtatgtttgtaattttagttatttaggaggttgaggtaggagaatcgtttggatttgggaggcggaggttgtggtgagttgagatcgtattattgtattttagtttgggtaataagagtgaaatttcgttttaaataaataaataaaataaaataaaataaaataaaataaaaaaattagtgtaggagaatataatagaaaagggggtgaggagtagggtaaataaatgatattagagaggtagagaatagatttgtttagggagggtattttttagggttgggcggaatgtgaatttttatatgtatgtgagttgggtagattatttgtgggtggtgggatcgtgggtatgtgttggagaaggggggatttattttgttttttttttgaagttgtttttatatttattttttttttttgtagttttttgaatgatgttagtttagtatgttttaatttttagtttggtttttttggtgttgttgagtatagttagagtaggttttttttttttacggtttaatgtgatattgttagtttttcggttttttttttagttagggggttatatagtgggggttggagtgggaagtttttttttttagttttacgagtatatagtggaaggaggggagaagtaggtggtatttatttatcgtattaatttgtttttttttattggttgtggttgttttttaggtatcgagtttttagtttttgttttagaggtataggttttgagggttcgtttagagattttggaggagttggtgaaggggtttaaggaatagtgtattgggggatgttgttttgtttttgtttaagttggtataggtgagtaggtgattatagaagagggtggagaggtggggtggggtgggtattgttagtttataaaggtttttggtatgaattagaagaaggtattttttttttattatgaggggtgtggatgtagtttagaatataatttggagagtagagttgggttatatgttaattaaagtatatgcgagggttttgagaggttgtatatattatatatattagtaattgggagtagatatggttttatgagatgaggttagtttggttaggggtttgtatataggagtattatataggtttagttttttttttaggagagagattgagatttgtttttttttttttattttaggttagatagatgtgcggattttttgtagtttttatggtgtgtttgatttgagtcgttgtatttgtttttgtgagttaggttggggtgggtttatttgtttagattttatagatgttgagattttttttttttttttatttttagtttcggggttttgtttagatgattgtaatgattagggtcgttgtgttcgtggtcgttgcgtgtgttttttcggttatattggttttagttgtggttggttattttgtttcggggattgttaaggtcgtgggcgttgcgtgtagggcgtgtgtgtgtgtcgggtaggttttttaggtttcgattgtagttagcgtttttgttttcgaggttgtagttagaggggacgttgtgagggtgggcgttgcgtgtgtgatttaggttatattggtgacgattgtggtatgaggagttgttttcgcggttgtagttagagggggcgttgtgagaatgggcgttgcgtgtgtaatttcggttatattggcgaggattgtggggtgaggagttgttttcggggttgtagttagcggggacgttgtaaggacgggcgttgcgtgtgtgatttcggttatattggcgaggattgtggtacgcggagttgtttttgggattgtggcgagggcgggcgttgcgtggacggtcgttgcgtgtgttggttcgggtatataggcgaggattgtagtacgcggatatgttcgagggattgtcggggtcgcgggcgttgcgaggacggcgaatgtatttgcgatacgggttatagcggggacgattgcggcgtgcgtagttgttttggcgattgtaattaaaggggtcgttgcgaggacggtcgttgcgtgtgttggtcggggtatattggaatcgattgcggttcgcgcgtttgtttacgcgattgtagaggtcgcgggcgttgcgagaacggcgtgtgtgtttgtaatgcgggttatagcggcgaggattgcggtgtgcgtagttgttttggggattgtcgtggtcggggtcgttgtgagagtggtcgttgtatgtgttggtcggggtatataggtcgggattgcggtacgcgcgtttgttttggcgattgtcgcgggcgcgggcgttgcgtggatggtcgttgcgtgtgtaattcgggttttatcggtgaggattgtgggagtcgtcgttgtttcggggattgtcgtgggtacggtttttgcgaggatggcgtgtgcgtgtgtgacgtaggttatttaggggaagattgtagtacgcgtagttgtttcgggggttgtcgaggtcgcggttagtgtttagatgggcggtgtgtgtgcgaggacggttattttggcgaggattgcggtgtgaggtagtgttcgaatgattgtagttagtacggcgtgtgttaggacggtgtgtgtatttgttgggaaggttacgtgagtgaggattgtagtattcgtatttgtttttttaattgttacgggaggggtcgttgtgaggaagggcgttgtttgtgcgatttaggttatatcggttttatttgtgttattcgtatgtgttcggttgattgtcggggacgtgggcggtgtgtgtaaggagtgtgtttgtgttacgtgggttatggcggtgaggattgcgggtaggaagagtttttagttagcgtttgttttggaggttgcgggtttcgggaattgtgtcgggtaggttagtgtgtgtgtgtagagggttttcgaggttttgattgtgttatttagatatgtttaggggattgtcgtggtcgaggagagtgttacgatggtagttgtgtttgtaaagatgggtatgttggcgaagattgcggagaaggtgagtaggtagttttttttagtgtattttgggattgtgattttgtgaataggagttatggggaagatttgagtttgaggaagagtggagggagagtatgttattttaaggagttagtgtttattaggggtagtagaattataggggtggggttttttagtgggtaggattggtttttagatttttgaggagtaggttggggtttatttagttgtatttagggagattttgtgtttttgaagatggagagaaggtgaaggcgatttaagtttcgtttagttttttgttagttattttttattagtagagaggagtgggagttaggatgggttttttcgatgtttttgagtaaaaggggttgtgggtgggggtggttgttttgtgttaattagttttttttaatttatttttttgggtagaggtgttaattattgagggtatgaggatgtattttttggaggagataatagttcggatagagtggatttcggtttttggtttcgtggatgtttatgaaatttagtttatttttacggtgagagagatgttaggttttaggaggggattgagtgggtaggataggggggtagggtttattttttggaggaagttttaggtgattattggttgagtttagatggttgggtatttgaagttgttgtaaaggtttttttagtttgtttgatattgggtattgaggtttttgtagtatttttagtaagtattggttttatatagttggaatatttggtaatagagagtttagtattttttgaggttgtttagtttattgttggttattattgttagttgttattattgttgtagaattcgtttgtttttattttagtatttgttcgttggttttagttgggtatttattagtagttggaatgttttttgttttttttgtgttttatattataggtttttaggtatttggagatattagtttgatgtttttattttttaggtaaaattttttagttttttcgttttttttttttaagtttttattttttgaattttttatttttttgtgatttttgttttttttatgtgtttttaaaatgtggggatagagaggggtttattgatttattttgaatttatggatattttttttagagttggcgtatagtaatttgtagttatataagtaggtagttgttttggttatatttggttttttaagtaatttttaattataaaagtaatataggtttcgtgtagaaaatttagaaaatatagattagtagggaaaaaagatggaaggaaagaagataatatttaattatatatattttttttttttttatttaaatataggtttttgtatttggttttgtttaatgttattttttttggtttgggttaagttgtttaggttgttgtaataattttgagtttgtgaattttattttttatttttttgttattagtatatgtaaattagttttttttttgtttttttttaatttgttttttttttttttttttttttttttttttttgagatagagagttttattttgtggtttaggttcgagtgtagtggtgttattttagtttattgtaatttttgtattttaggtttaggttatttttttattttagttttttaagtagttgggattataggtgtgtattattttagtttgttaatgtttgtatttttagtagagacggggtttttttatgttgtatgtttaggttggttttgaatttttgggtttaagtgatttgttcgttttagttttttaaagtgttgggattataggtatgagttattatttttggttatttaatttgtttttaaaatattagagggaatattttaaggataaagttttgtggttatttatttggggtttttttttgtgtagattgggtttttaagatatggtcgtttttttagttgtaaattttttgatatttttattatttaatttatgtttttttgtattattttataaatgttatatggggtgtgggttatgttatttttatttttattagtttagttaggattttgtaaaaataaataattttttgggtttaaagtttcggaaggtattaggatagaaggggatagtttagaggaattgttatttttattttattttgttttgttttgttattatgttttttaggttagttttttattatgttttgtttttttttattttttagttaaagtagaagtagaaattttaatttcgtggcgtaattaagatagtttgaatttttttttttgtttaaatatttttttttgttgttgttataaaaatattttaattacgagataagaatttggtaattagagaaaagaaaaataatttttggttgttttttattaaaataagtattgttaatattttaaagtgttttttttattttttttttttttgtatatattatttatatagttttaattttgaaagggtgggatttcgaaaaggaagttttttaagaaattttagggaaagaagaattaaaataaatatttgagataagaggagtttttagggtagtagttgttttttgttttgagtaaataaatataaatcgatttttggtgttgttaagggcgtcgttttttagttgaagttttagatttttttttttatttagagttaggatggtggtgttaagttggtttgtgttaggtttggttatgtttttagtttatttattttgttttcggtatgggtatttgttatattttgggttttttttgagtttgggtgtggaaaatatttttgtaaaattggtttttagatattttttttgggtttgggttatttatttttagattatgttttttgttgtttgtagttggtttttggtatcgtattttttgttttggtaagtgttatttattttttttttttttttttttttttttttttttttttgagatagagttttgtttttgttgtttaggttggagtgtaatggcgtaatttcggtttattgtaatttttgttttttaggtttaaacgatttttttgttttagttttttaagtagttgggattatagatatttgttataatgtttagttattttttgtttatttttgtgggtatagagtatatttaatagttgtttgttttttggttgttgttgttattttagaagtttatttttattttttattttttttttttttagaagtattttttttttaaagtttaaattttgttattttagattaagggatatatttagttattggaattattttttagaatgtagaagaagaaagttttttttttttttgtatatgtggtattgttattttgatttagtggtttttaaagtgtgttttttggatttgtagtattagtattatttgggagtatgttaggtatgtaaattgttagatttttttattagatttattgagttagaaagtttgggtatagagtttagtaatttgtattgtaataagttttttaggtgattttgatgtttttttagtttgaggttttttaagtgaaggaatgttgttattttgtaaagtgttagttttattatgaatgtgagagaaagtatggggaaattgagggagatgagtttttgaatgagaaagaggtttagatattttttgtttgggtgtgttttgtagtttggaaattagggttaggttaagtgtttattgggatttaaaattttatagttttagagaagtttttgtttgggtttagtttaaaaatagtaatgagggtgagataagttttaaggattagttaaggtagagtttatttggagttacgaggttaatattgagataaattttaaaattttttaagaataaaattagtgaagtaggttaggcgtagtggtttatgtttgtaattttagtattttgggaggttaaagtgggtggattatttgaggttaggagtttgagaatagtttgattaatatagtgaaattttatttttattaaaaatataaaattagttgagtatggtggtatatgtttgtaattttagttatttgggaggttaaggaagaattttttgaattttggaggcggaggttgtagtgagttgagatcgtgttattgtattttagtttgggagataagagcgaaatttcgttttaaaaaaaaaaaaaattagtgaagtagttaagttttattaaggggtagagttagttgttagtatttgtttagaaagattgttttagggttaggtgtggtggtttacgtttgtaattttagtattttgggaggttgaggtgggtggattatttgaggtcgggagttcgagattagtttgattaatatggagaaatttcgtttttattaaaaatataaaattagtcggatatggtggcgtatgtttgtaattttagttattcgggaggttgaggtaggagaatcgtttgaattcgggaggcggagttcgcgatgagttgagatcgcgttattgtattttagtttgggtaataagagtaaaatttttttttaaaaaaagaaaaaagaaagtttgttttagattagtaagatggtgttaggagacgtaggagatatgggttaggttgatggatttttaggggattgtttttagatggattttaggaggaattaagaagtgtttaaaggatatatatagggagaaggagaattttggggataggtttgttttattgaaagaattagatattattagggagtatttaaggtgtgtgtattgcggttgtggggatggggtgggtgtggataaagagaaagagatatatatatatatagagaaaatgaataaataaattttgggaagggtaaggattttatgggttttgagttgaggttaatttaaggttttttaggttggggtattttaaggtagggtgaataggagagggttggaggttttatgtgtttaggaaaattttttaatttagaaaattgataaagttttattttatttttaatttagaaatttttacgtggtttttttatttggttttatatttcggtatttattatgttgatttttttatagtttttttggtttaggagagtattttttgaaatttttaattttatttggttgaatggaggtgtttttattatagttaatatagttaggtagaatatagtatttttagcggttgttttagttggatagtatagtaaaatgtggggttgttagaatgtttatagatgtatagttttttttgtttttttagtggtgggtattttaggagattttgtttggagtagggtttagtagattttttttggaggtattatatataattataattttttaaatgtatatttgtaggagtgttgtttttttataagtatttgttaagtatagagattgttgtaagtattttatatatttaagatgtggttatatatttagttattagagttttagttatttgaggatagggattatatattttatttttgtgtttttaatgtttagtatgatgttaggtataaaattaataattaggaaatatatttgtggaattttgagtaggtggtttttgttttgaggagtttataattcgggtgaagagataagaaaagttttttaagggaaaggttgtgatgcgggttttatttttgttatatagttatgagtaggtatttacgaggaggtttagggtgaggtagattttttaaggagaaagtgtaatttgaaggggtatttttgatttattttatttgttttgataggattaagtttaggaaaaggttttttatgtttaggtagttagagttgttagggtaaagttggagggagagttttggtgtatgttgggtggaattttggtagatgaatacggggtgtttatgagaggggattttgatagataaatagggggtgtttatgagaggggattttgggattatattgttagggtttaaatttttgttatttttttggtgttggtgacgttggtaagatatttgtttttttgtgttttagtttttttatttgtaaaatgggattaataggatttgtttcgtagggttgttgtgagaattaagtgagtttatgtgtgtatttcgtttagaatagtggtttataaggagttagcgtttttagtatgtttgttttttagtttgtatagggttaagttttatatagtattatgttgatattgtttagaattggagaaagaagagataagggggattgagtagtagaggtaagagtgttagtttttgagttatttggtgtttttttttatagatagagggggcgagttttttatttatagtacgggttttaagttttgttttagtttatgattagagaggattggtttttggataggagtattaggttattgttcgagtttttcgagggattagttggggtttttttgtttttaagattattattattagtgagagttggggttgtggggaggggtgttttgagtggagatttggattagagagggaatttgtttttcgggagggtagaaggaaggggttggatgggggttaggtttttggaaggaaagatgatgattgaagaattagatatttatttgagtttttttttttaatttggttagtgatcgatgggttttaggattttcgagtggtggttgtgatatcgataatattggagtttggttggttgcgtttttaggttgaggtggatcgatttgtggtgttttacgttagtgtcggtaattagagggtgaggttggaagtgttttttgaagtagacgggacgttgttgattgatttgatgttaggcgtagaatatgtggtgattgttatagcggagcggggtcgggtagttagttatttagtttttgttagggttaatataggtatggttggttagaggttagggaagggttttggttttttagttttggatttttttttttaggagtttaggtttagggtttatagatttttttgaatgtttttggtaggtgtgtggtagtttcgaggtatttgttgggggttttgttttgttttgaggttattggggagatagagtttttagatgtttggagttttgtaggaaggttataggttagtttatgaaaggaatggttttagggagagaagtgaataggagatgttgtttgatttagttagttaagggaggtttttttttaaatttaggtatcgggataggttttgtgttgatagattttgtgggattggaattaggtagattagagattattagttttgttgatttttggattgggattgttgggaggtgggttttatagtagtgattttttattaaatttcgaggttttttaatagatatttggatatttttttttttttgtgatagggggatatttatttcgttgtagtttatgttttttttttcgattttttttttttttttttagttatagggttttatttacgggttttttttttttttttagggtattaatagtggtgggtttggaggggaatgggggggttgcgggatattgatcgattttttttcgttttttttttaggtggggttggggtatagggaagaggtttttggttttggtgggagggatcgagggaggggttgtcgcgggaaggagtgtcgggagggagttgttattgatttgttttttttttttttgtttttggtagtattaggttattatagttattcggaggtgcgttttttagtttcgttttttaagtttcggtttcggttagttttagtttcgcggtttttacggtttttttggttttcgaggttagtagaggaaagggaggaggagttttcgtttaggttaagtttgttttagtttttacggcggttttggggtaatttgacggtcgagttgagtcgttttcgcggtacggtgtaggatttggagcgttatttgcgggtttacggttatttattgcgggttaattagatttatacgtcggtggcgcgttatatttatgaatatttgtagcggcgtttgttggtcgtcgttttagtcggttttttcgtattttcgtttcgttattttcgttttatcgttagttttgatttcggtattaggaaacgggattttaattagggaatttacggtttttcgtttgaaggcgtcgatcgggtggttgcgtttcgttattttaagttagaggtgttgggtagtttcgtcgatggcgcgtttttcgtgtttttcgacgggtttcgcggttagttcgagcgcgtggtgttgcgttggcggttttagtcgtttgtagagggtttcggcggtgagttgattgtgtcgggtattacgcgtatcgttagtttgttcgattttaggttcggtattatttattacgtggaggtttacggggtgcgggcggggtagatttttaagttttacgtttttattattattataggtagtgtgggttggggttacgggatatttattttttgtttagttttatttgtcgttggagtttgtatttatgaattttttttattgttattttttattgtttttttttatttttaggttttatttggtcggggttttagggggtttttaggataaagtacgagtttattgtttttagaagacgtttttattttagggttttggtatttattttgtggatgtttaaggttaaggtagcgttttttttggggtttttcgggatatttttaggattgttattttaggtaatagagggtgatgtggttggggtatttgtaaagatttattggagtagtttgagtgggttgggaattgaaaatagtgattttcgttttgatttattgtggtgagagtggttgaagattgtggttagtggttattgttttttataatttggttttgattttgaagggatatattagaattgcgtgggggtggtttgggtgttattaggtagtaattgtatattggggaggtgaaattattgttttttaagttggttttttagattttttggtttattttatgttggttttttttataggaacgatgtttgggtttggggaaagggtattttgtggttgttgtggggagggtggtggattttttttttttttatagggtttagatgttatttgatttggatgtttatttttatattttttttttttttttattgtttattttttttttgtattttttttttttaatattattgttttttttttaggttttttattgtagtattaatggaagttatttgattattatttagtgggggggatgtatgtggggagggatatggaagttttcgggggttggaggttatggaagttttgtggggtgaaggatagtaggttttattttatttattatttgtttgaagtataggttcgtttgtttaggaatgtggtagatgggggtgtttggaggattggttgatttttgggaggagggagtggtttaggtgagggaattagaagtagaagtagaataaggtttttagaggttggagggtagaatttggggattggggatttttttttagtttttatattggattttttttttttttttattttgtttttttttagggtttttatttttgggttttttggggattatcgatgagtttttttttttaggtttttcgacgacgtaaggggtttaggttttttttttgtagtagcgtttttaggagttgggagagttgagggtgttgggtagagatgagatagggcgttttcgtgtggtttggatcgtttagtttgatatttttgtttatttttaattgcgtatgcgggtgttcgaggggtcgggggtatatgaggaagtgttgttaggggacgttcgttaggttttggtgtttttatttttttttggaatttcgtatgagttgttattttatggggttttttttgggggtaagttttttgattttattatttattaaggtattatgggtatattttggattttgtttagattaatattttgagattgggggaggagttggggttattgggattttagaggtaggatggatattgaggggttagtgaagggtagggttgatgtttggggttggatagaggagaaaaggagagaaaaggaattgtaggtttagtaggaagatggatcgagggggattttaaaataatgataaggatgggtggggagaggggaaagaggtagaggtaaaaaggtcgagggtgggatagagattttaggagagaggttgaaggtttttggttttttatttgtagttttttttgttttgttttttgtttttatttttcggttgtttttttgtttttttttgttttataaattttttagggtgggtatgggaaggtttttggatattgatttttagtttttaatatttcgtttttgggagtttggtttgtagtggatagtagtttatggttttattagttagtttttgttgggggtgaaggttttttggggtagggggttttatagttattaggattttagatatggatgaggtttgtaggattagtgaaagataggttttggggtatttggtttttatattttttttttgtttttttttgtgggattagggtggttgatttattttttagttttaggttaagtttattattggaagagagggtggtaagagagatagtagtttaggtgggtagaggagtttttagattgttttgatgttgtagtagggaggtttgaaatttttatttagaattagggggatttgaaattttcgtaaagattttggtgtgtagagagattaagattttgtgagggatggagaaattgttataagggaagaagtagagattgagagggaaatgttttttttttagaagagttagttattgaggggtgggtagatagagtttttcggggagggatttatttaggatggagtgaggtgggtaggggagagggaaggagatatagataagagaacggttgagtttattatgttttgtttttgttttttaaattttagataaggatgaggagaagtttgggaagtttttaggtttattacgtttgggtgagttgacggtgatagataggattttcgattttttgtttttgcgttggacggttttcgagggcgagtttgattttttcgtgatttagtataaagatagggacgggtagttttaggtggtgttcgtggaaggattttagcgttcggtcgttattatttttttggattttggtcgtaagtataaatttgttttgtatgggtttgttggtaagaagaggtatggttcgttggtggttgaagttaagatttgtgagtgatagtagtaatattttgttttttgtattgttttgaagaggtttttttagtgttttgggaatttgttttgggagtttcgggaaggttttttggaggtagtggtgtatgagttgaattttgaagggaaagtagtggtggggtaggtaaagagtttgagaagtttagtgtagtttgagggagttacggtgagtaaggtggggagagtatggttagtaagagaattattgttatagttttttttggttggagaatagggtatgtggggggtgttaaagggtttggttttagggttttttgtgttgtgttgaggggtttgggttttattcgaaggtttttagagggtttttgaagggtaaagtgggagagtgatgagattagatatttattttgtaaataatcgggtggttgttgagattagttggagaagtgagttaagagttggtaaaggttagtagggttgattttgtttataattttagtattttgggaggttaaggtaggaggatcgtttgaggttaggagtttgagattaatttggtaatatagtgagattttttatttttattataataaaagatattagttaggcgtggtggtgcgtgtttgtagttttagttatttgagaggtttgaggtgggaggatcgtttgagtttaggagatcgaggttgtagagagttatgattgtgttattgtattttagtttgggtgttatttatattttgtatagagtaatattttgttttaaaaaaaagaaaaatgatgatgggttagttgggatggtggtagtggggttggatgggggaggcgaaggaaagtaaggtgtattaggtagtttttagggttttggatgagatagttttattttttgaggtagggagtagtagaggtggggaataacgttttagataaatttagattaatatttaagagatatttatataaatattttttgtgtatttattgagagttagttgtgattaagatgttttttaagtggattattatattttataaagtatatttgggaggtatgtttattttataggttaggagaattgaggtattagagtagtcgtgtggggttggggaagagatagggttattggaattttgtcgatagtttatatttatagcggaggtagaggaagaagagtttatagggtagtttgcggagtgatttgtagggaggggtagaattagggagggtgttgtttggattttaggaaggagggtgcggttggatttgttagatttcggaatagtgatttaagggttacggagcgtttatagaatttagtaatggtaaggttatttttggtttgtatgagagttgttgtttggtggaggggtggagttggatcgggagggtggtggaggtgaggatatggttgtaattagtgtagatattattttttggaatttgggttgggaatgagagtaaagagggaagatggaggttagagagagatgtatatagagtgggggtgaggaggggtgtgatagtagtttgttgaaatgttgatggtatagttgttggggagtgaagggttagtgttgtaggcgagggagtttatttatgggttaaagtttttaaagaggaggagaggtttgtagtatagatgagggaggttgttttatattaaaacgttttaaggattgtgttttttttttttggagaagaagttagttagtagttaggtttggaagtagtggaggttgtattgggaagatttttttggttatggagatgtgaaagggtttggttgggtttttttttttttgaagttttttgttgttttggtttgtggttggaggtagagttatattagtttacgtagtgtttttatgtcgtttgaaagaaggtatttattttttaaagtggatattattttttattagggtatatagttcggtaagtagagtgttggttggattttagtttttttgtatttttttagtaaatgtatttttgtgtagtgaataatttgtatagttttatatagtatttttatgtgggatttggtttttttattttttttggatttaagttttttttttttttttatttattttttttagtgttttagagtgatttaagtttagggattttattttatttgggaaatttgtgggtgatagattttattttagatttattgtattttttttggattgtttttgagggttagtttgatatttttatggtttagtatagggatagggatggacggttttaggtggtatttgtggaagggttcgagcgtttatttgttgtttttttattggattttgattataagtatagatttattttgtttggaattgcgaataagaagcggtatggtttttttacggtcgatggtattattggtgagtagtagttattttagtttttatgtgatttttttttagttttatgtatatttttttttagtttaaaattagttggggttttttagtaagatagttgattttagtttttcggttttattttagggttgaggggtagttagattttttcgtattgttgggttttttttattttaagtagtagtttttcgtggtttagaaggtgtgttatattttggttgtgttaggttttttagaagtttagtattcgaattaatggattagtgattttttattttttataggtgtgatatttcgtcgaaattttaagttttagttttaggttgttagtttagtatttggttggatttttttgtttatagttttagagaggaaagaggagttttttcgttttgagtttttggagtagttttttttgggggaattgatagtgatcggcgtgattttagattttttgcgttttttatggatagtggtttagggttttttcgatttatttatggtttagtataaggatgtataggggtagttttaggtagtgtttgttgcgggggatgagaatgaggttattgttttcggtttggatttcgatcggaagtataagatgaatttttacgggtttcgtggtaggtagcgtgtggggttcgagtttgtggtggttaagattggtgagttatggttgttaggttttttttttttgttagttttattttgtgagcgggatttggttggggttttttttagtttttttttattttcgtttttttagtttattttgttaaagtttttatttattttttttcgtattgtttttttgttttttgtatgttaggttttttttatttagtttttatttttttattttttttttagttttatttttttatttttaagggtaggttttatttttttttattttaaatatttggatttatttttttatttggggttgttttttttatagatgtttttattattcggttattgtgtttttattttttagtttttattgggtttttttatggtttggtttgggttatggttatttttgggtttttgttatttgttgtttataattttttgttatttttgttgtgtttagaggtggtagatttaagtgataagagtattacgtttttttagtttttttgtagtatgaagaggattttttttagttttcgattttttgatttttagtttttttggaatagggtaaagggattgtgtttagtttagtattttagtttgtttttttatgtttttagtttttttttgtttagtgttatttttttggtttgtgaattatttgatgagagatagtgtggatagtggttaggagtaaagatttcggagttaattgttcgagttttattattagttttgtaatttattttttgtaggattttgtgtaaattgtttaatttttttgtgttttagtttttttttttgttaggtggttggattttagtttttttgtatagagttgttggaattatatgagttaatatatgtataatatttagaaaggttaggtatagtggtttatgtttgtaattttagtattttgggaggttaaggcgggtggattacgaggttaggagatcgagattattttggttaatacggtgaaatcgtgtttttattaaaaatataaaaaattagttaggtatggtggtaggtgtttgtagttttagttatttaagaggatgaggtaggagaatggcgtgaattcgggaggcggagtttgtagtgagtcgagatcgcgttattgtattttagtttgggcgatagagtgagattttattttaaaaaaaaaataaaaataaaaataaaaaaagtttatatatttagaatagtgtttggagtagtaaagtatttttagagtgagttgtaatttttttttgatttttttattttttagtaattttttttgttttttatttttttttttttttttgggttgttatttttgttaattttttttttaatttgttattttaaagtagttttttatgtagtaggttatagaagggttggttttttttgtgttatagtttttttattttatggagttttagtagagatttaattgtagggggcgggtaggtgtttatagggttgtgattttagagttagttagggaaggatatgtttttttttggattttatttattttagaattttttttttatttatgtttggagttttgttttagtaatttattttttggggttaaaggggagggaggggtagggttgtttggggaggttatagtaagagtatattttatggttagatttttatatgaggggtggggtagttagagtgttttggggagggtataggtaggaagaggttttattgttttttttattgtttgaggttagtattgttagtgaacgtggtttggaagaatttttagaggttttttttttttttattttagttttttttttagatacgaagggagattttttatttttatagaatttattagagtaggatggggtaagggttgttttagttttttttattcgtgagtgatcgaatggtaaatataaaggttatagagtttttgagtttatagcgtaagggtatttttatggttgttatttgtgggtagtagtagtaaagttagtagttttttatgtttttatttttttttttagttttttaggaggatgtggacgagatttttagttttatagaattgggtacggaggtttcggagtttttcgaggagtcgtttttgggggagttgatagtgataggatttttttttgattcgttgagttttttttggatcgttttttagggtagtttcgatttttttatcgtgtagtataaggatagggatgggcggtttcgggcggtgcgtgttgggggtaaggagagtgaggttatcgtgggaggtttagagttcgggtataagtataagatgtatttgtacggtttttacgaggggtagcgcgtgggttcggtgttcgtcgtgggcgtgataggtgagtgaggggtaggggtttgttttggtttttttttattgttggtttttagtttttttgtagttagttgttttttttgttttagtggaattttgaggttgtttgttaggggaagatttagaaagagtatgttattggggattggcgtattattagtttttatggttttgagtaagttttaaattttttgtatttttgtttttttgttcgtaaaatggggatatttattttatagagttattgtgagggttaagtgagttaatagatgtaaagtattaagaatgggtttggtaaaagtaaatatgttgttagtgtttgttgtgagaattgttataaatatttttattttgaggtttgttttgttttttttggttggtttagttatttggttagaatgtatatgaatttaaggttatattattttgaaggtgttttattattttttttgattttagaagttaagtagggttaggtttggttagtatttggatgggagaatgcgcgtgagatattggtttttttattagtatagtttgaagtaagttttttttttttttttgtttttttttttttttttttttttttgagatagagttttattttgttgtttagtttggagtgtagtggtgcgattttagtttattgtaatttttgttttttaagtttaagtgatttttttgttttagttttttaaatagttgggattatagatgcgtgttattatatttggttatttttttgtatttttagtagagacggggtttatcgtgttggttaggttggttttaaattttagatttttaagtgagttatttgtttcggttttttaaagttttggtattataggcgtgagttattacgtttgattataaagtttttttttttttttttttttttttttttttttttttttttttttttttttttttttttttttttttttttttttttttttttttttttttttttttttttttttttgttttttttttttttttttttttttttttttttttttttttgttttttgagttttgttgtttaggttggaatgtagtggtgtaattttggtttattgtaatttttgttttttaggtttaagtgatttttttgttttagtttttcgagtagttgggattataggtatgtattattatatttggttaatttttgtatttttaatagagatggggttttattatgttagttaggttggttttaaatttttgattttaagtgatttattcgttttggttttttaaagtgttgggattataggtataagttattacgttcggttataaggttttttttaatatttatttagtgagtgattttatagtaaagaagaatattttttttatttttttttttaggtttggttatagggttatatttattattatataggattagtttgggtattttttttttagggttttagtttaagaggttgagtggatagtagtgtttttgggattttcgggttgatttgttcggtttagttatagtgaggggaatttttttttttttttgtttatagaaataaagatatattttttttaaaaataatttttattataaggggaaagatttaaaaattaaaagtagagaaatagatagttttttagaatatggtttttgtaattttattaagtttagttttattatgatttggttgattttatttttagaattttttatttttaatttattttttttgttttagttagttttgagaagagggagacggtaaagttattttgagtggttgtttttggggtttgaggttgtagggtggaggttggtgttaggtttagatatgttgttaagtttgtttttggagtgattttttttttgtcgttttgttttagggatttatattgggttttgtgaggttttgtgtttggtttttggggtaaggatgggttttgttaggtattgattaagtcggtgtagtagagataaatggagtttgggaatttgataaattgagtttttttttgtttttttttgtttttagttgtatgatttttatttttttattttattattatttttttgagatagagttttgttttgttatttaggttggagtgtagtggtatgattttagtttattgtaatttttggtttttaggtttaagtagtttttttgttttagttttttaagtagttgggattataggcgtttattattatattcggttaatttttgtatttttagtagagatagggttttattatgttagttaggttggtttcgaatttttgattttagatgatttattcgttttggttttttaaagtgttgggattataggcgtgaggtatcgtgtttagttagttgtatgattttgaaaaatttatttttttttttggaattttagtttttttatatttaggagggagtaaacgttgtttagtttgttgttacggttaaaggtggtgatgtaatatgtttggtatttttttagtttatttattttttgtttagattttttcgtgagggaatttttgtatatttatgttttaatgttggatattttgaaatatgtattttatacgttttggataaaatagatgaggttttttaggaaagaaatgggtattagtgcgtattattagagtagtaaaaggacgaagtagttggagttcgttaagttgggggttgtgtttggtagtatatatagtgtagttgttagggggagaggtgcgtggagtttattagatatatttttaaattggaaaaggattgttttatatgtagtatggggattgttagagttatgaatcgttataattgtatttttttagttaatttaaattattagtaataaagtttgatggtgaaggatatttttatttttttatggaaagaagtgtagagagggtaaaaaggagtagggaatgggtgttgtaggaataagtaaggttagaaggtaaatgaaatgagagaaaatgtttagtttggtatttgtatatagtagatgtttaatatttggtggttattttgtttttttttattattttagttgtttttatgtttgttttttttagtttgatttatttttgtttgttcgaggtttggttattagtttgttttaagtagttgttatttgtttggagttttgttttgtttttcggaggaagttagagaaataagtttttgggagttttatttatttagttattttttttgttattttgttttttgggattattttttagtttgtttattaatgagtgtttttttatgcgggagtggtggggatttgtaggttttgagtttagatttgtagattatttattattttatagatatttgtggagtatttattgtgtgttagggattgggatatagtagtgaataaagtagagtttttgtttgaggagtttatattttagtggagagggataggtaataaattgtataaatatgttagtggtatcggatgtgatagtgatgagtggtggggaaaagtagagtttagtagggagatagtaagggttttattgcgagggtagtgtttgaggaaagttttgaaggaggtgagaggatagttatttaggtttttggggaaagagtattttagatagaaggaagagtaaatgtagagattggtaggcgagaagtagttttagatgtttgtagatagtgagggatgtagtatgttttgtggtggagttggaggagggtaggtaatagggaatgatttaagagatgaatatgggattttagaggttagtgtaggatttggattttattttgagtgaggtagaagttattgcgggaattagttttggttaatgtgttaataggatttttttggttgtagatttaatagattaaaggggggtgagggtagaaggcgatgatttgagagaatgttgtgataatttaggaggagttagtggtgtttggaggtggtaaggaggggttagattttgaaggtagtgataataggcggatatttatagggcggatgtggagtttaagagaggattcggggatgattttggcggtttagatttgagtagttggaagaatgaagttgtaattttggttaggcgtggaggattatgtttgtaattttagtatttggggaggtcgaggcgggcggattatttgaggtcgggagtttaagattaatttgattaacgtggagaaattttatttttattgaaaatataaaattagtcggacgtggtggtatatgtttgtaattttagttatttaggaggttaaggtaggagaatcgtttgaatttaggaggcgtaggttgcggtgagtcgagagggcgttatcgtatattagtttgagtaataatagcgaaatttcgttttaaaaaaaaaaagttgtaattttattgaggtggggaggttgtggcgggagtaggtgttaggaagtttagaggtttagttttggatttgttgagtttgatatataagtaggtttttaaggaagacgttgtacgaatattagtttggggtttaggggaggtttggatagagggtgtaaatttggagttattggtatatagatggaattttagcgtttttttagggtgttagtgatggttgatattttttttttttaataaatgtagttttagatatcgagtagggatttagtgaaggattgttgattagatagatgtttagattaatgcgtttttatattaaaattattatgcgggttttataaatgtaatagatatcgttgggtgtggtggtttatatttgtaattttagtattttgggggttgaggtaggtggattatttgaggttaggggtttgagattagtttggttaatatggtaaatgtcgtttttattaaaaatatatatatatataaaattaggtaggtatggtggcgtacgtttgtagttttagttatttgggaggttaaggtaggaggatcgtttgaattcgggaggtagaggttgtagtgagtcgaggtcgtttattgttttgggtgatagcgagattttattttaaaaataaaaaataaaaaataaataattagatattattattataagaaaagggggattttttattaatagttttttattatttttgttttagttttataataagaagagatttttttagttattgagttttcgttggagttacgtttaggagagttgatagtgatagatgtgatttttaattttgtgggttttttttggatagttttcgagggttagtttgatttttttatagtttagtataaggataaggacgggtagttttaggtggtgtcggtggcggtagattagcgagaggttatagtttataatttggagtttgagagaaaatataagatgaatatgtatggattatatgatgggtaacgtatgggttttttgtttgtggttatcgtgacgggtgagtaatggggggatttagtttttatttttggttatttagagtttttttattttatggttttttttttagttttgttttggtattatcgtatttttattgaggggttagatttttttaggttttggttcggtgattttgttagtttttttgttttttgatttttttattttttttagggttagagtttttttagttttttagttttttttttatttttattttgtttttcgtttaggggaatgttttatttttatttggtttaaatttagttatagatttttttttttttttttcgattgtttatagttgtttttattttttttttttataattttgttgtgatttggatatagttgttattttttgtttttgtttttttttgttgaggcgaagtgttttatattttgagtttttttttaggagttttttgttatttgtttgtattgtattttattttagttttggagagtttttatttttttaggaggttgttttatttttgttttgggtttttttttgttttttatggttttttgggtataggttttttatgattgttgtgttgtggtatttggtgaaatttttattttatttgaaggtaatgtttttaaatttgtaaaataagttgtataggattataaaggaaatattatatttatagatagttattaaaatattttttttttatttttgagatggagttttgtttttgttatttaggttggagtgtaatggcgcgatttcggtttattgtaattttcgttttttaagtttaagtaatttttttgttttagtttttcgagtaattgggattacgggtacgtgttattatatttagttaattttttgtatttttagtagaaatagggtttcgttatgttggttaggttggttttaaatttttgattttaggtgatttattcgtttcggtttggtatgagttattgtattcggtttaaaatattttttaaaaatttaaagttacgatttagtaatatttggatttatttattagtttattaaataataggatttggtggcgcgtttattaaattataaaatttagaagtagtgatggatataaaaggtattttaaagtttttgtaataattttaaggtgatatgaaaatatttgtggtttttattggtaataaagttataataattttattttggtgggttttttatattagttttggaaagaaatgttgtattttagttagaggtttggaagtaaaggtgtaattattttttattttagtttatagtttttttgaggtttttaaagtttaggggttttttttttagagattttaattatgttttttgtttttttaaattttagttttttttttattagttttagttatagaggtttttaagttttttttggagttacgtttaggggagttgatagtgacggatataatttttgattttgtgggttttttatggatagtttttgagggtgaattcgatttttttgtggtttagtataaggatagggacgggtagttttaggtggtgttcgtggttgtagattagcgggaggttattatttttgatttggaattttttcgtaagtataagtttttgttttttgggatttaggatgggaaacgacgtagtttagtttttgtggaggtaaagacgggtgagatgggtttttatatagttgagtttgaggttatagtttttttatttttttttttattttttttgttgagttttttttttgtttatttgttttgttttatttgaaaagttatatggggttagtatagtgatttatgtttgtaattttagtattttgggagtttaaggtaggttaggagtttgagattagtttggttaatatggtaaaattttgtttttattaaaaagataaaaattagttgggtgtggtgatgggtgttagtaattttagttattcgggagtttgaggtataagaattatttgaatttaggaggtggaggttgtagggagttgagattgcgttattgtattttagtttgggtgatagagttagatttcgttttaaaaaagattaaaaaaaaaaaaaaagaaagaaaagtcgtaaagtagatgaggattaggagagtggggttagtttttgggtttgttgttttttgttgattttgttttttttttcgtaatttttatttttgttggatgagggaagtttttataggtttttttttgtagggtggatgtgggagtttgggggtgttgggagaaggggcgaggggagttaggaattttttttgttttgcgaatttattattttttgagagtttttgttgttttttttgtgatttttatttaggtttttatttttttagtttaggtttgtttgggtttatatgtgttttttatagaggttgtttttttttttttgttttttttttgaagttttagaaattgggaattagaggagtttagtttagttgtgttttttttcgagggtttagtttaagtttttttttgtttttgggggttttttattgttagaaaatttgtaataataatgtcgttagcgtttttatcgtttaggaaggtagtaggttagtttttttttaagttttgggatggttttttaggtagatattagattttttttttgtttgagtttttcggtattattttttttaatatttttataggtagtttacgtttttttattaggtttagtgggagttttagttttttcgggttagtcggtgtagaataagaaagggaacggagaagggtgagaattatttgtgtcgtaatattttgtttttttgatttgtcgagtgtttttattagggattttgcgtttttcggggtcggttaaattatttttttttttaggggtcggttaaattacggttaaatcgtgtgtttttgggtaagaggagatagagatttagtttgtaagaagttgtattttgttggggaagtagtttgtgagaggcggaaagaggttggatagaaaggggagtaagatgaggtagggagttagggaatttttttttttggaggtgatttaggataggtgattttttttatttgggttaaggggagagaggtatggattagacggagatggtggtgaggatgggaggtgatggaaatattttggggaagtattgagtatttgggtagttttgggtttttttagttttagagggaggtagttaaggagtcgttttggaaaaaataaatataagaattttttttttttagttgttcgaggtgacgttagtttaggggttttatttcgttttggggagttgtgggtgatagattttattttagatttattgcgttttttttggacggtttttgagggttagttcgatttttttgtggtttagtttaaggataaagacgggttttaggtggtgttcgtggagggttatgagcgttttgttattgttatttttttggatgtcggtcgtaagtatagattttttttttatggttttttgggtaagaagcgttatggtttttttattgtcgacggtattacgggtgaggggtattttttgtaggtttttgttttgttttttttaggttaagtagtagacggttatttgtggtggttgttattattattatttggttttagttattcggtttagatttagttttttacgtttttgtataagtttttagtatagttcggtaggatttagttacgtaaagttttgtttttagattttttaattttgttcgtcgaggttatttagttttttagaaatagtttagtcgtttttttttcgtgtttttattttagaagttcggagtgttatggatgatattggaataaagcgttttttaaaatttcgtttgggggaggagttgtaggtgattatcgtgatttagaatttcgtgggttttttttggatagtttttgagggttagtttgatttttttgtggtttagtataaagatagggacgggtagttttaggtggtgttcgtggagggtagttttagggaggttagcgtgtcgggtttggattttgtttataggtataagttgttgttttacgggttgtattacggtaagcgtgtgggttttatttcggtcgtcgttattattggtgagtgtgcggtagttggaatatttgtgtttttttttcgtttggtttttttggtttgattgagttataagatttttgagttttttattttatattatttttattgatttagaaagtttttttgtgtttttttagagttagttgttttagttttagtttttagtaattattgtttgttttcgattattttggagatagtattttgattttttatgtaatggaattataatacgtagttttttgtgttttattttttgtaattagtataatgtttttgaaatttatttatgtgtagtaaaagttggtttttcgattgttgattgtttgtttttattttttttttttttttattttttttgagagtttgggtgtagcgatatattagttatttgtttttatttgtttttgtgaattagtcggtagggaagaaacggaaattgagattacggtttcgatttttttagcgtttgagttttatttcggggagttgatagtggaggaggttacgttatatattttgtattttttttggatggtgattgagggagaatttgattttttcgaaatttagtatatagatagagacgggtaattttaaatggttcgtataggaggtgatcggaatgatattattttttttggtttggaattcgattatagatatttggtgattttgtatggttttagtgatgggaagtatgtaggttttgtttatgtcgaggttttgataggtgagaattttgtttattatgtttttttttagatggttgggagagtttagaggatagtagagtttcgcggatattttgtttattttagttttttttttttatgtttttgtttagtttcggaggaggagaagtttttagaattttttatcgtaattttcgagttttttattaagtttcgtttgggggagttgatcgtgatagatgttatttttgatttttttagtttgttttggatagttttcgagggatagtttgattattttttggtttagtataggaatggagatgggtagtttaaggtagtgagggtgttagggtacgaggaaggggttattatttcgggtttggagttagattataaatataagatgaatttgtacggtttttacggtggttagcgtatgggttttgtgtttgtcgtcggggtgataggtgagtggatgatgggagttttagggtgggagttatgggagggttatttttttgttttttggtgatgattggtggggaatgggataagggtttggttagtattatagatttgtttgtggttggggttggggttttttttgggtttttttgtgaggttgattattggttttttttgaatagagaggggttatcgggaattttgttgtgttggtggttgttttaggttttttatagttgattttggaatttgttatgtgtgttagttgttagttgagtaggattatttagttttaagagtaggtttttttgaattgatttcgggttttttagttatagttttggtttttttttttttttttttagtatttaaggatattttttttatttttttttttttttttttagttgtagaggaagagatttttagttttatagaatttagtatggaggtttcggagttcgttgaggagtcgtttttgggggagttaatagtgataggatttttttttgattcgttgagttttttttggatcgttttttagggtcgtttcgatttttttatcgtgtagtataaggatagggacgggcggttttaggtggtgcgtgttgggggcgaggagagtgaagttatcgtggggggtttggagtttgggcgtaagtataagatgtatttgtacggtttttacgaggggcggcgcgtgggtttagtgtttgttgtgggcgttacgggtgagtgtgtattgtagagttttttgggttgggttttagtaaagtatagtttttagtattttttttattagggatttagaattttaagattttaaatttgtaatatattttgtttattaaaggtttaggataggtgtgatttggggatagagagagtaaatttaggagaagtgtcggagttatatgggaaaggtttttagggattgaggttttttgggaggtgatttattggttggtttgtggtttttcgtttttttttggaattttatatataattttttttgtgagattggaatatatttttgaaatataaattaattaaattaataagtatttgttaaataaaattttaaatgtataaatagaaagaatagtataaagattttgttatttttttttaattaaatatcgatttttggttagtttggtttatttttgttttatttattttttttattagaattattagaatgtttttttttttttttttttttttttttttttttttttttttttttttttttttttttttttttttttttttttttttttttttttttttttttttttttttttttttatttttttttttttttttttttagataaggttttattttgtcgtttgggttagagtgtattggtatagttataatttattgtattgtagttttaattttttgggtttaagggatttttttattttagtttttcgaatagttgggattataagtgtattttattatgtttagttaattttttgtattttttgtagagatagggtttagttatgttgtttaggttagtttcgaatttttgggtttaagttatttttttattttagttaaagtgataggattttaggcgtgagtcgttatattcggtttgaatgttttttttattaatatttttatggagatataatttatgtggtataaaatatatttgtttttagtgtataatttattgattttagtatttttatttatttgtgtagttattattacgatttaattttagaatttttttattatttttaaaagaaattttgggtttagatttatttttattttagttttagtttataattaatttatttttttttttgtagattgttgttttagaatatttcgtataaatggatttaaataatatgtatttttttgtgtttagttttttttattgagtataatgtttttgaggtttattaatgtagtatgtagaagtattatatttattatattgttattgattgattgattgattgattgattgattttttttgagataaatttttattttattgtttaggttatagtgtagtggtatgattatagtttattgtagttttagatttttgggtttaagttatttttttattttagttttttaggtagttggggttataggtgttcgttattatatttagttaatttaaaaaaattttttgtagagatggggttttatagtgttatttaggttgatattaaatttttggttttaaggaatttttttgtttgggttttataaagtgttgggatagtaggtatgagttatttgtttttttttagttattatattgttttttattgttaaatagtattgtattgtgtggttatattattgtagtattttaaaaacgaattatagatattttatgtttttattattaaatatttaaaggtatatttttttttaaaaaaattatttttaaaaaatttataatatggttaggtgaggtggtttacgtttgtaattttagtattttgggaggttaaggtaggtggattatttgaggtaaagagtttaagattagtttgattaatatggtgaaatttcgtttttattaaaaataataataataataataaattttaaaaagtataaaaaagcggagcgtggtggtacgtgtttgtagttttagttatttggcgggggttgaggtataagaaattgtttgtatttaggaggtggaggttgtagtgagttaagatcgcgttattgtattttagtttgggtgatagagtgagattttgtgttaaaaaataaataaataaataataaaattttataatataattagtatattttgataagtgaataattatgttttgatattaagtatttaggtagtgttatagtttttcgagtgttttataattgttgttttttaatttgttgttgaaattaggtttatagaaggaggatatattgtaattgagaaaattgaaattttaaatagagtaattagggaaggtttatagaagaaggtggtttttgaataaagatttaaaggaagtgtggggatgagttatgaagatatttggggaaagaatatttaggtagagggaatagttattgtaaaagtattgaggtaggaggttgtttggtatggttgagggattataaggaagttataaaatttgattatgattataattagaaatcgattttaagttagggttagattgggtttattttttgatttgaatttaagatagttggggttttaatatttttttgtagtaagagaaaagattttgtttttatttttttttagttttcgaagaggagttttttgatgttttttttgtaaagttgcgtttagggtagatgatagtgagagatattattttcgatttttttagttttttttggatagttttcgagggttagtttgattattttttggtttagtttaagaatggggacgggtagtttaaggcggtgcgggtgtcgggatacgaggatggggttattatttcgggtttggagttagattataagtataagatgaatttgtacggtttttacggtggttagcgcgtgggtttcgtgtttgttgttggtttaattggtgagtgtgtagtagggtattgggttttgttttgaattagatttagttttttttttattgttagtatttggtggttttattttattttttttgagattaagttttttaagtttttgggaatggttttgttggtgtttttatttcgagattttggtattgttttaggttttttgttcgttatatatgggttttttgggtttttaaagaggtgggggattaggaaaataatatagattgaggtatatttggggttgattatagttttagtttatttgagttgtgtgtttttaagagatttatataatttgtttgggtacggtggtttatgtttgtaattttagtattttgggaggtcgaagggggtagattatttgaggttaggagttcgagattagtttggttaatattatgaaatttttatttttattaaaaatataaaaattagttgggtgtggtggtatatgtttgtagttttagttattcgggaggttaaggcgggagaatcgtttgaatttaggaggcggaggttgtagtgagtcgagatcgagttattgtattttagtttgtgtgatagagtgagattttgttttaaaaaaataaaataagtaaataaaaaatagatatacgatttttttgtatatttttttttttatttgtaaagaaggaataattatatttgtcgtgaagggtgggcgggagtgtggtttggtttttatatataatgagagataattgtagttttttttttttgaggaaggtaggtagtttttgaaaatcgtttagggtaaatttttataattattattgattttagtgggaaaaattgtatgtgttttttaagtttttaaattaatatttatttatttttaaaataatattgaattttgttaatatggatattattattttaattgtaaatattggttatgtgtataatttaataaggtattttttttttattattttgtaattcggttttttgatgtttttgtaagtttttttatagttgttattttttagatgtttaagatttagtttttaaaaagaatagataaatgaaatgtgatgaatttgtaatattattattaaggtagaataaaattttatgaagagtagaaaagattaaagaaattaatgaaaataaagtaattgattttatacgggttaaaagaattggtattattggaggtgttttttttgtcgtaagttagtagagttattgtaggtttagagataatttagttgtaaagatgtttttatgtggttttatttttttatttttagttataaaatttaagttggtttttaaaaatgtttaggattaggtggaatttttaagtttaggtggatgaattttttgatataatttgtttgttgtgtttggttggtgttttttgttttttttttttttttttttttatgttgagatggagttttattttgttatttaggtttttaggttggagtgtcgtggtgcgattttagtttattgtaatttttgttttttaggtttaagtagtttttttgttttagtttttcgagtagttgggattataggtatgtattagtatatttggttaatttttgtatttttagtatagataggatttcgttatgttggttaggttggttttaagtttttgattttaggtgattttttcgtttcggttttttaaagtgttgggattataggtttgagttattacgtttggttttgattgttgttttttgtttgtttgtttgtttttgtttgtttgttttttttttgagaaggagtttcgttgttttttaggatggagtgtagtggcgtgattttggtttatcgtaagtttcgttttttgggtttatgttatttttttgttttagttttttgagtagttgggattataggtgttcgttaatacgtttggttaattttttgtatttttagtaaagacggggttttatagtgttagttaggatggttttaattttttgattttatgattcgttcgtttcggttttttaaagtgttgagattataggtttgagttattatattcggttttggttggtgtttttataaagtattaattttgttttgtaaaataaatttgtttggtagtttttaagggttttaggtttgtatattgagtattatagggatgttatttgagtattatgattttattataggtgtggtgttaattgaatatttaaagtagaaaaatgatattttaagtttggggtattagtatttagattgtgggtttttggtgtgtttaagagaattttagagttttttggttaaaaggaggtttattaggtatgtttatttattttattttttgatgtagttttaggaaaggatgaagaaatggttttagtttcgatagaattttttatttttgaattttttattaagtttcgtttggaggagttgatcgtgatagatgcgatttttgatttttttagtttgttttggacggttttcgagggatagtttgattattttttggtttagtataagaatggggatgggtagtttaaggtaatacgggtgttaggatatgaggatagggttattattttcggtttggagttagataataagtataagatgaatttgtacggtttttacggtggttagcgtgtgggtttcgtgtttgttatcggggtgataggtgaatggacgatgggagttttagggtgggagttatgggagggttatttttttgttttttggtgatgattggtggggaatgggacgggtttggttagtattatagatttatttgtggttggggttggggtttttattgtatttttttgtgtggttgatttttggttttttttgagtagggaggggttattgggagttttgttgtgttggtggttgtgttaggttttttatagttgattttggaatttgttatgtgtgttagttgttagttgagtaggattttaagaatgggtttttttgaattgattttaggttttttagttatagttttggttattttatatgttttttagttatagttttttttttttttttttttacgacgtaagtatattttttagggattttgttattttttttgtgttttttttttttagttgtagaggaagagatttttagttttatagaatttagtatggaggtttcggagttttttgaggagtcgtttttgggggagttaatagtgataggatttttttttgattcgttgagttttttttggatcgttttttagggtcgtttcgatttttttatcgtgtagtataaggatagggacgggcggttttaggtggtgcgtgttgggggcgaggagagcgaggttatcgtggggggtttggagtttgggcgtaaatataagatgtatttgtatggtttttacgaggggcggcgcgtgggttcggtgtttatcgtgggcgtgattggtgagtagtgtttggagtttcggggtaattattttttttttatgggtatttggtttattgttgtgtttttttattaagttttgtgggtttagatttgttttttgtgttttgttttttttttgtgttttgtggttgtggtttatgttagcggtttgtttgtttattttggcgtggtttttttttaatggttaattattgataatttttaagagtgaaatatgttaggcgtatattaagtttgatttacgagaatttttttttttttttattttaataatagtattttttgttataattatatatataaatgtatataagaggaataatttaacgttaaattacgttgggatgattaaataatttaggtaatatttataaaaagagttattatgtcgttattgaaatgttttaatataagatttttattttataatgttatattgaaaaaagagagtttaggttgggtatagtggtttacgtttgtaattttagtattttgggaggtcgaggcgggttgatcgtttgaggttaggagttttagattagtttagttaatatggtgaaattttatttttattaaaaatataaaaattagttaagtatggtggtatatgtttgtaattttagttatttgggaggtggaggtacgagaattgtttgaattcgggaggtagaggttgtagtgagtcgagattattattgtattttagtttggtagatatagttaaatttagttttaaaaaagaagaaaaaggagtttaaatttttgtaaggatgttaattataattatttgaaagtaataggtatggtaagaagattggaaagaaatatattttacgggttgtttgatttgttagatagaatagaatattttagtatatttttttttgtattattttattttgtatagtttaaatttttttaaatggtaaatattttttttataattagggaaagggaaaagagaaaatatataatgttttttttttttttatattttatttgttttatttttttatcgtttttgtggtttattttatttattttttttttttttttttttgagatgaagtttcgtttttgtcgtttaggttggagtgtaatggtatgatttcggtttattataatttttgttttttggatttaagcgatttttttgttttagtttttcgagtagttgggattataggtatgcgttattatatttggttaattttgtatttttagtagagagggagtttttttatgttggttaggttgtttaaatttttgattttaggtgatttgttcgtttcggttttttaaagtgttgggattataggtatgagttatcgcgtttagttagatttattttatttttaattatgaggaagtttaaaatttttagtttataagaaattggaggggtggagattatgaggttaattgaattttaaatgtttagttaggttgttttttttaagttatttttagttaggttgttatgtttggtttagagtatttttcgagaatttttatcgatggggaagaattagttttgttgagaggcggttttttgtagggtaggtcgttatttttgtggtattaagtgaggtgcgagtttattttttaaaggttatttagatagaggaagtatttttaatcggtattttcgatttttgggggagaggttttatttttatatgtatgtttagaggattatttgagtgttgggaaatagggggaatagggaaattattggaaaatgaatattagaaaaatttatatttcgggggtaagttgttttggtttacgtttagttttgtgtttttgtttttattgtggggaattatagaattgatagaggataggttgagggatttatttttgttttttttgttttatgtgtattgttgttttatttttattttatattttattattaattgttgtagtttagaattttttttttttttttttttttttttttttttttttgagattgagttttattttgttgtttaggttggagtgtagtggtgtgattttagtttattgtaatttttgttttttaggtttaagtgattgttttgttttagttttttgagtagttgggattataggtgtatgttattacgtttggttaatttttgtatttttagtagagatcgggttttatgatattggttaagttagattcgaatttttaattttaggtgatttattcgtttcggttttttaaaatgttaggattataggcgtgaattattgtttttagtttagaattttttttttagtttacgtttttttagtgaaaataatatagtaatattatgtggaaagtttgaaaaatagaaaataagaattttatagttttatttttttttttagttgtcggtattaataataatgtgtgtagtgtatattttttttttgtattttgtatgtagagcgtgttttaaagttgtaattagtgtttataaagtttttggtatttttttttttgtatataagtatattgtaattatttattttacggttatataattagtatttattatcgttttaatggttatttgatgcgttgcggtgaaagtattataataaaattaattattttttacgggttatttgtgtttttgatatatttgttgttatgaataattttatcgtgagtttttttatgttataatttttttttgttttaataatttttttaggatagatgtttagaattgggattattgggttaaaggaaatgagaattattttggtttttgatattatgttttagttgttttttggaggtttttaatagtgtagttttgttagtagtataggtcgggggttcggggatattttatcggtttttattttaagagttattgaacggcgaatataaagttgttttagtttttagtttgttttggaggggcgtatttgatgtatgatttttgttgatagtattagtaaagtaagttgtttttaaatttttaaattttgtatttttttatattattttttagttttataagaggatgtggacgagatttttagttttatagaattaggtatagaggttttagagtttttcgaggagttttttttgggggagttgatagtgataggatttttttttgattcgttgagttttttttggatcgttttttagggtcgttttgatttttttatcgtgtagtataaggatagggacgggcggttttaggcggtgcgtgttgggggttaggagagtaaggttattgtgaggggtttggagtttgggcgtaagtataagatgtatttgtacggtttttacgaggggcggcgtttgggttcggtgtttgtcgtgggcgttataggtgagtgagtgtgggtggggtagggttggaagatagttttagaaaatgtgtttttttttattatttttttatatatatttttgttttgatggggtttatagtgaaaggaatatagtaatattatggaaagatatgttatggagagataggttgtaatttagtaaatgaagtaaaggcgggtgagtatgtgatagggaggtttagggtttaggttaggattagatagggacgtttaagttattttgtttatgggtatttaggggatagttaggatttgaggttaggtatgttttagtttggtgatagttttagagagaaggtgaagtgtgttagataattatagttggtgtaaaggttaggaggttagaaagagtatggtacgtgagaggtattgaggattgagtggggtgttttttacggtgagtattttattttgaagtgtgggagtagaggaggggattatttattaggtttggggttttttagggatgaggatgtggttgtttaggtttgtgttgagatggttttagtagttgtgtttgtgtgaagtttattcgtgggggttgaagatggggatggggtggtagggagtttggaggtagcgaggttagtaggtagttggtggttttggtgagaggtgatagtggtttaaattaggatcggggattggaggtggggtaggaaggtatttaggggaatttagggtaaagatgttttgaggttgttggtagttggtgaggagttggatttaggaatatattttaggttttggtttcgggaggagtgtgttgagtttgttgcggagtaaagatagaagtttagtgaataaaagatggcgaagagattttagtgttgggaggttaggggtgtagaggtcgagtggggttgtgtttaaaagagaggcggtgttggagggatagggagaggtggtttgggtgttgggaggtgggggtgaggtgggggttgagggtaggagggttagggtgagggataggaaaggttataggagaggagaggatgaagagttgtgttggaggggttgtgggtagtatcgttttgtttttgggtattttgtgttttgtgatatattttttttatgttgaattgaggagttagggattttattgtttttatacgtgtttgtttaattttagaggatgaagtcgagattatttaagtagtgtttattatgatttttgagttttttattaagtttcgtttgggggagttgattatgatagatgttatttttgatttttttagtttgttttggacggttttcgagggttagtttgattattttttggtttagtataggaatggggatgggtagtttaaggcggtgcgggtgtcggggtacgaggacggggttattattttaggtttggagttagattataaatataagatgaatttgtacggtttttacggtggttagcgcgtgggttttatttttgttattggggtgacgggtgagtggatgatggtagttttagggtgggagtcgtgggagggttatttttttgttttttggtgatgattggtggggaatgggttaggggttcggttagtattatagatttgtttgtggttggggttttttttgggtttttttttgaggttgatttttggttttttttgagtagggaggggttattaggagttttgttgtgttggtgattgttttaggttttttatagttgattttggaatttgttatgtgtgttagttgttagttgagtaggattatttagttttaagaatgggtttttttgaaatgattttatatatttagtagtggttatggttttttttttttttttttgaagatttgagtatattttttaggtatttggtattttttttatattttttttttttagttgtagaggaagagatttttagttttacggaatttagtattgaggttcgggagttttttgaggagtcgtttttgggggagttgatagtgataggatttttttttgattcgttgagttttttttggattattttttagggttatttcgatttttttatcgtgtagtataaggatagggacgggcggttttaggtgatgcgtgttaggggcgaggagagcgaggttatcgtggggggtttggagttcgggcgtaaatataagatgtatttgtacggtttttacgaggggcggcgtgtgggttcggtgtttatcgtgggtgtgataggtgagtgtttgtgagtgaggaagatggttttagaagatgttgttttttttgtaattttatgaaaataaaaatatttttattagtcgggttttttttgtacgtttttatgtttggggattttgttaagaggtagattggggtttaataggtttgggttagggttagagattttgtatttttaataagaaatgatgcggatgttgttggtttatgattacgttttttgagtagtaaagttttttacgataaaggaattggatttttttttgaaatttgttgaagagaatttttttgcgtttttgatttttggtagtgtgttttttttgtggagttgattaggggtcgtgaaggaagatagaaggtagtgaggggtagcgcgtcgattgtatattttggaagtttattattggaataggaataggaatagattttttttattaatgggttaatttgtttatttagtaaagaattttttgttttgattcggatattgtaattttagggtattaatgttttttggttaacgatttttagaaatttatttaaaattgaatggatggaattatgttttatgtagtgtaggaggattgtggggtgatttaggaagaggttttagaaagagattgttaaggaattgggtttgtgtttggtgttttaggaaagtatttaaggaagtaaggttttgttttttattagacgttgttaggaagaagggataattttattatcgggcgttttattaagttttatttttggggaggttaattagagtaaggttaaagttgttattggtaaagaagtagttattatttagattagttggatgggtgatgtttggttatttttgtgttttggaaaatgttagagtttatttttattgagatatgattatagattggttttgtttttgttttgatttattttattgataaatggtttagtttgatgttgatgttttatgaaattgtttgtttaattggattacgttaagattagattgtgttaggttagttttaagtagtcgtggtttggtagagggaaagggtagtttacgggtgttagggttgttttttttttttataggcggaagttggaaagtgatatatataagtttatgtttttatggggtttataattgtgggtataagtagaaaatcggaaagtaagtaaagaaggatgagtatgtggagtttaggagttaagttaggattgggaagggatagtgaagttattttgtttataagtatttaggggatagttaggatttgaggttaggtaggttttagtttgatgatagttttggagaggaagtgaagtatgttaaattattatagttagtgtaaaggttaggaggttagaaagagtatggtgtgtgagagatattgaggattgagtggggtgttttttgtagttggtggattattttgaagtgtgggagtagaggaggggattatttattaggtttggggttttttagggatgaggatgtggttgtttaggtttgtgttgagatggttttagtagttgtgtttgtgtgaagtttattcgtgggagttaaagatggggatggggtggtagggagtttggaggtagggaggttagtaggtagttggtggttttggtgagaggtgatagtggtttaaattaggattggggattggaggtgggggaggaaggtatttagggaaattcgggggagaggtattttgaggttgttggtagttggtgaggggttgggtttaggaatatattttaagttttggtttcgggaggagtgtgttgagtttgttgcggagtaaagatagaagtttagtgaataaaagatggcgaggagatattagtgtagggaggttaagggtgtagaggtcgagtggggttgtgtttaaaagagaggcggtgttggagggatagggagaggtggtttgggtgttgggaggtgggggtgaggtgggggttgagggtaggggggttagggtgagggataggaaaggtcgtaggagaggagaggatgaagagttgtgttggaggcgttgtgggtagtatcgttttgtttttgggtattttgtgttttgtgatatattttttttatgttgaattgagaatttagggattttattttttttatacgtgtttgtttagttttagaggatgaagtagagattatttaagtagtgtttattataatttttgagttttttaataagtttcgtttcggggagttgatcgtgatagatgttatttttgatttttttagtttgttttggatggttttcgagggttagtttgattattttttggtttagtataggaatggggatgggtagtttaaggtggtgcgggtgtcggggtacgaggacggggttattattttaggtttggagttagattataagtataagatgaatttgtacggtttttacggtggttagcgcgtgggttttatttttgttattggggtgataggtgagtgtacgatgggagttttagagtggggtttgtgggagggtttttttttttttggtgatgggtgaattggtttaggaagtttttttgtttttggttgagttatggtatttttttgtttttttttatttttttgaggattgatagatttttttgggtggagaagggttttgtgagttttgttggtggttgttttaagttttttagtattgattttagagtttgttatgtgtgttgattgtaaattgagtaagattatttagttttaaagatgggtttttttaagttgattttaggatttttatttatggttatagtttcgttttttttttttataagatttaaggatattttttagggaagttgttttattttttttgttttttttttttagttgtagaggaagaaattttcgtttttatagaatttagtacggaggtttcggagttttttgaggagtcgtttttgggggagttgatagtgataggatttttttttgattcgttgagttttttttggattattttttagggtcgtttcgatttttttattgtgtagtataaggatagggacgggcggttttaggtggtgcgtgttaggggcgaggagagcgaggttatcgtggggggtttggagttcgggtgtaaatataagatgtatttgtacggtttttacgaggggtagcgcgtgggtttagtgttcgttgtgggtgtgataggtgagtaagtgtgagtgaggcgaggtggggaagatggttttggaagatattgttgtttttttagttttcgtgaaaatatattttgaagagtatttttttttttgtgtatttaaatgtttggagatttttgttaaaaagtagatttggatttagtaggtttggtttagggtaagagattatgtattttttttttttttttttttttttttttttttttttgagatagagtttcgttttgttatttaggttggagtatagtggtttaatttcggtttattggaattttcgttttttgggtttaagtgatttttttattttagttttttgagtaattgggattataggcgtgcgttattacgtttagttaatttttttatatttttagtagagatgggttttatcgtgttagttaggatggttttaattttttgatttcgtgatttgtttttttcggttttttaaagtgttgggattataggcgtgagttacggcgtttagtcgattatttatttttaataagatttttatttattttgatgttattggtttaaggaatatattttttttgttgttttttattgtagtaaagtatatttgatataattcgttattttaatcgttttttagtttgtagtttagtatgaagtttatttatattgttgtggattgttattttttatttttagaatttttttttttatattgaaattttttatttattagatacgaatttttattttttttttgttttagtttttggtaatattattttattttttgtttttatgaatttgattttaggtattttatataagtgtaattatataatatttgttttttttgaatggtttattttattaaatataatgtttttaaggtttatttatgtcgtagtattagttagaattttttttttattttattttttgtggtaatgggggtttcggtatgttgtttaggttggttttaaatttttggttttaagcgagttttttattttgattttttaaagtgttgggattataggtaagagttattgtatttggttagaattttttttttttttaggttgaataatgtttcgttttatatatatagattatattttgtttatttttttatttattgatggatatttgggttgtttttattttttagttattaagaataatgttgttatgaatatttgtgtgtaaattatagaatatttttgtagtaaagttttttttagtaatagatttggaaatttttttagaatttgttgaagcgaattttttttgtatttatgaatttttatagaggttaggtttagagttagggtttttgttttaatgggaaaagtttttgttttaatggggttaacgttatgggggataggttgtggattagtaagaaagtaaaggcgggtgagtatgtgataagaagtttagagttaggtaggaatatttaaattattttatttgtggatatttaggggatagttaggatttgaggttaggtaggttttagtttggtgatagttttagagagaaggtgaagcgtgttagattagtataggtggtgtaaaggttaggaggttagaaagagtatggtgtgtgagaagtattgaggattgagtggggtgttttttgtagtgaatagatagttttgaagtgtgggagtagaggaggtttggggttttttagggatgaggatgtgattgtttaggtttgtgttgagatggttttagtagttgtgtttgtgtgaagtttatttgtgggggttaaagatggggatggggtggtagggagtttagaggtagggaagttaataggtagttggtggttttggtgagaggtgatagtggtttaaattaggatcggggattggaggttggggaggaaggtatttagggaaattcgggggagaggtaattttgaggttgttggtagttggtgaggggttgggtttaggaatatattttaggttttggtttcgggaggagtgtgttgagtttgttgtagagtaaagatagaagtttagtgaataaaagatggcgaggagattttagtgtagggagggtaagggtgtagaggttaagtggagttgtgtttaaaagagaggcggtgttggagggatagggagaggtggtttgggtgttgggaggtgggggtgaggtgggggtcgagggtaggggggttagggtgagggataggaaaggtcgtaggggaggagaggatgaagagttgtgttggaggcgttgtgggtagtatcgttttgtttttgggtattttgtgttttgtgatatattttttttatgttgaattgagaatttagggtttttattgtttttatacgtgtttgtttagttttaaaggatgaagtcgagattatttaagtagtgtttattatgatttttgagttttttattaagtttcgtttgggggagttgatcgtgatagatgttattttcgatttttttagtttgttttggatggttttcgagggttagtttgattattttttggtttagtataggaatggggatgggtagtttaaggcggtgcgggtgtcggggtacgaggacggggttattattttaggtttggagttagattataaatataagatgaatttgtacggtttttacggtggttagcgcgtaggttttgtgtttgttattggggtgacgggtgagtgaatgatgggagttttagggtgggagttgtgggagggttattttttgttttttggtgatgattggtggggaatgggataggggtttggttagtattatagaattgtttgtggttggggttgggattttttttgggtttttttatgtggttgatttttggttttttttgagtagggaggggttattaggagttttgttgtgttggtggttgtgttaggtttttttatagttgattttggaatttgttacgtgtgttagttgttagttgagtaggattatttagttttaagaatggatttttttgaaatgattttaggttttttagttatagttttggtttttttttttttttttttaggatttaaggatattttttttattttttttttttttttttttattgtagaggaagagatttttagttttatagaatttagtattgaggtttcggaggtttttgaggagtcgtttttgggggagttgatagtgataggatttttttttgattcgttgagttttttttggatcgttttttagggtcgtttcgatttttttatcgtgtagtataaggatagggacgggtagttttaggtggtgcgtgttaggggcgaggagagcgaggttatcgtggggggtttggagttcgggcgtaaatataagatgtatttgtacggtttttacgaggggtagcgcgtgggtttagtgtttatcgtgggtattacgggtgagtggggggataggttttcgtttttaggtttatttttgtagtttttttgtgttttttttttggattttggtattttttttgattgggtttttaggtttttgtttttttttttatgttgttaatgattttgttttatttttggatttatggagattgtgtggagttagatgggtaggtagtttatgttttgtttgttgtagttttttttttttattgtgatttggaatttttatgttgttcgtgtgtttatttgttagtttttaggtttttttaaggagtattttagtggtttagaaagtgttttagatttagttgtttagatttgtatgtgttttcgaatgtagtgattgtgcgattttgtaggcgttttttaattttgtgttttagatttttgtaaagttggggtgatgataataatggtatttattttatatgttgtgcgagggttaaatgtattattgtttgtgagttgtttatagtaatgtagggtatagattttaaaataagcgttttagaggaggtcgttaagaaatgtttattttagttttgggagagtattgttttttttgcgtagggttttgttttttgatttatgggtttgttttgttttttttagcgtttttgtttatattattgtcggtggagtttcgtttgggggagttggcggtggcggtcgtgatttcggatttagtgggttttttatggacggtggtttagggtttttttgatttttttttggtatagtatagggacgcgtaggggtagttttaggtagtgtttgtgagcggagattttcgagcggtcgtcgtttcggggttggattcggttcgtaagtataagtttttgttttttggattttagaatgggaaacgttacggtttagtttttgtggaggttaggatcggtgagtgagggttggaggtttttcgcggttagagttttcgtttttttgtggtatttgttggaattttacgttttgtgttttatattttagtttttagtatttattgatttattgggtttaggaaaatttaggttttgagttttttttttttatttatatttatttttttttttattttttttgtattttaggggatatttgtttttttgtttggttttttttttatttttatttttggtttagttattttttcgtttttgggatcggtttatagagttatagtagtttaggaagtttcgtggtttttttgtttttattttattttttatgtattttattgttttttttagttttagatattaaatcgttttttcgtttgggggagttgattgtgatagatgcgatttttgatttcgtgggtttttcgtggacggtttttgagggcgaattcgattttttcgtggtttagtataaggataaggatggtcggttttaggtggtgtcggtggtagttaattagcgggaggttatagtttagggtttggagtttagtaggaaatataggtttttgttttatggtttgttaggtaggaaacgattgggttttatttttgttgatagtattataggtgagttttagtttagtttttattttttttagagttgttttttattcgagtttttagagttggttttgtagttttttcgtgagattttttttattagttttgatataattattttaatttcgaaagtgagtttttttgtgtgttaggtatagttttgaagtatatgtattatttttttttattcgttgattgttgaggaaataaaagggatacgggttttggggttagtagatttgtgttttagttttagttttagtttttgttagggtgattatggataagtcgttttattttcgggattttagtgtttttatttgtataatgttgggaatggcgttggatttagtagtggtttttattttttttttttttttttgattcggagtcgaggggtggaagaaaagggagggtttggttatggaaagacgatggaaaaatttggtgttattatgtttatgatttagttttttgaggaaggggtgtggtgggttatcgatttttattttatttttaggattatgagttattatgtttagaggaggatagagtagtcggttagtttgggtttgggtttttgggatttcgtaattttttttttaaatttttattgtggggacggggtatagatttttatttatcggttttagttttattcgggtaagtttttgttttgttttttgtttttttagttaattttttgttttttttttgttttattttggttgtttcggtttagtggggttagtgtggggttggggaagtaggaggtacggatgtttaggttgatggttataaggggataagggggagattatagtttggtagtgatgggagtcgtgtattggtcggttgtttagattagttttcgatgtttggggtgttttcgtgataatttagagattttcggggagttttttttagttttggttttatttttgtttaggggttgggggttagggtaaataaaggttttttttgtatttttagttatttatttttcgggagatgatttgtaatgaatttggcgtattttcgattatagtagggaaggggcggggtaggaaggagtttgggtagtagtttttagaggaggagggggttgtttttttttatttttgtggggtatggcgggagtaggtttgtgtgtttttttaaggagttgtttttggggttatattggagggattattttttagaattttatattttcgggaggttgttagggtttaggtaaaggtagtatgtgattaagagtttttttttttttttttgtatagtttttttggagaaggagttatttttttatttgggggaattgatcgtggttgaggagatttttagttttttgcgtttgttttggacggtagtttagggtttttttgattttttcgtggtttagtatagggatacggacgggtagtttagggtagtgtttgtggtcgtagattagcgtatagttatcgtagaggatttggagtttggtaagaaatataagtttttgttttacgggttttttgggggaaagcgtttgggttcggtttttgttttgggaatgataggtgaggttgttgtgtttggttatagtaagttagtttgtgtgggtttttttgtgtatttgggttgaagataaagatgattgtaggagtgggtaggtcggagtggggcgttttggtttgtttttaggaaggaggaggagtttgtagttttgtgggttttaatatttattaaggagtttagagtaggagttaggttaggcgggagggaaaggttttgggaggggttttttaattttttagtttcgattttgtttcgttattgttattgttttttattattcgttggggttgttgtcgttttttcgaagggtggttttgtttagatagcggtaaatttttttgtcgtggatgagttaggagtatttttttaagaggaatattattggaaaataaaatgagcggggatatagaaattaatagtagtggttgtatttgtggtataggttttttttttagagttcgttgatgtttattttagataggtttgattacggtacggttggtgggatttgttagttattttaattagttagttttatttttagttttttttagaagggagtattatattttttaagtttagtgaatgtatttcggtatgggtggggttagagtttgtgatatttcgaggtgggttcggtaggatatcggggtgtggaagggggaagcgagtatttgatttagatagcgcgggagttcgtaggagttacgaggttatagcgattttattgtttgattgggtttggatttataaattttttattttagttttgggttaagtttggaagataaaaatggagtattttatggcgttttttatttagatttttttttgggttttttttacgtagttttagaagaggatatattagttttagagttagttttagaggtttttgagttttttgaagagtttcgtttaggagtgttgatcgtgatcgatataattttagattttatgcgtttttcgtggagcgtggtttagggtttttttgattttttcgtggtttagtatgaggatacgaacgggtagttttaggttttgttcgtggacggcgattagagtaagatttttattttaggtttggagtttagtattttttataggttttttttttatggtttttatgaagggaagcgtttggggttttttttagttgagggtattataggtattattaggcgttttcggtttttagtttaggatttagaagggagaaacgggggtttagaaggggtggtcgtagggaaagagcgtgaggcgggtattagggagagaggatggatgggttggatgcgagtggtttttagttttgttttataggatttttttgtggttgtaagtttttggttatagatagagaaataggggtagggaggggggtggaagggacgtgttttgggttattaagttggtgtgtttttgtttttaatttttttttttttatttatttcgtgtagggttggtttttgttggttagattttagaggagttaaggtttcgtttgttttagttgtttgtgattgacgtgattattagtttattgaggtttaattgggaggttttatcgggggttttcgatttttttttgtttcgttttggggttttattattaagtattttggagtcgtattcgcgtttattgttgtagcgcgagttgatggtgtcggggatacggtattcggtcgtgtttcgggatttgcgtttcgggattttgtatagtttgatattgtatgggttgcgaggattttataaggtcgatagtatttagggaatcgttcgtatttttagtttaggtaaggatttatatatattttgttttaaagtgggggtttttgtattttacgggggggatttagtgttttagttagcggtgggggtgggcgagttggtggtgggtttggaggaatttgtagagcgatttttatttttggggattagaggaaaaggggtggtgagtttgtgttggagtagaggcgagggggggattcgtagggagaagtttttttgtttttgtttgcgttattgttttttgatttttttgtagttttggagagttttcgtgatttttaatttagtgaaattagggagattttagttaaggttaattggatgtttttattatttcgggcggatagttttaaagttttttattagttggcggacggaggtggtgtttttgttatgtgtttatcgtttcgtatttttttttttttttgtattttgtttattttttagtcgttttggggttttttgggtaattttcgatttttaatgtttttaggggagttttagagtgtgtaggtggatggttaggttcggatttagaaattttaggggttgattttaggcgttcgttatgaggtgatcgtggtttcggttcgaggttttgaggagagtgagttttttataggtttttttattacgggtgagatggattgggattcggggtaagaggtgggagttaagaaaacggtatgggtgggagttgagagagaacgaggagggtgaaagggaggtggtggaggtttcgattgcggacgggaggttagtggagtttggggaggtacggagtagagagagtcgcggggatttttttgagttttttttttttttttagtttttgacggttttatatagttgcgtgtattgaatttgatcgagggattcgtcgtgttgtattggaagtttttttagaattttgtggatatttatgacgtttaggttatagtttttgggggtgagtaggtttgaggtttttggaggggatttgtttagggtggggattgtaggggggaggttggattttggtcgaggatggagggggtaggttttgatgtttttttttatatttttagtttcgtttttgtaggcggagattttaggtagcgcggtggattattttttgtatgattttgttttttatattaattatatcgttatagtgcgtggtttgcggggttttaattttatttttttagttagtattatttttattataggtagggtttgtggggtgtgtgggatagggagaggaggtagagggagttaggttgggttttatttttattttttttttttgtttttttttttagggttagaggtttttcgggatttggaggttaaggaagtgatttttcgtatcgttttgtttatttggattgagtttttagttcggttcgtaggttatttgtttagtttttatatttttggtggatagaattaggtgtttcggttttattgatttaatttttttttttgggtgattttaggaggtgttgtttttggttttttcggagggtttttattttttttttttttgatttttttttgtttgttttataggagattttgtttttaggagggattatattttattagttttttggtttttttttttttattttttataatgtacggttttaggttatgtggggttagagttttttgtcgttcgtgtttattttttttattacgggtatttggacgtacgggttcggggtcgggggttgggtgggtagttagggtttaaggtttggaaaaggattggtttttgttttttttttttaggtgggttgcggatttttttttttagggattgcggggaggagatgtagaacggagtcggtgtttttaggattagtattattttttttaacggtaatcgcgagcggtttttgaacgtgttttgcgatatggagattgatgggggcggttggttggtgggtggtattgggaagtttaggggtttgtgtagggtagggtttgttgtttcgggagttagaggttgatggtgtttttatttgttttttaggtgttttagcgtcgtatggatggatagatagatttttggagggattgggaggattatgtttatggttttgggaatatttttggagagttttggttgggttagtgttttatagggattggggaattacggatggggatgggggttttgtggatattaggattttgatgagggtacgtattttatttttaggtaatgaggttttgtatagtttgatataggtaggtgattattttatgcgcgtggatttgcgggttggggacgaggttgtgttcgtttagtacgattttttttacgtagattcggttgcggagtattatcgtttttatttggagggttattacggtatcgtaggtaagtagaggttgtgaggttgggagggtgaggttgggaggggaggtttttatggtttttttttttattttgtttaggggattttatgagttattatagcggtagtgttttttttgttcgtgatcgggattttaatagtttgtttattttttgcgttgttttttatcgaggggtttggtggtataggaattgttattacgttaattttaacgggttttacgggagtatagtggattattaggtgaggggtggggaggcggtttagagttggggtggttggggttcggtttgtttaggttttagttttatagtgtaataggtaagggattgagtggttgggtgaaatggaataattatgttagtttcgtagagggagttggagttgatttattggttggaaagggttagtttagaattaagttttaattttttgtagcggagggttaggaagggagttttgcggggaggttggttgagtgttgggagttatttttttaaggggaatgggaggagtagatgggatattcggttttgatttttttttgataattttttttttagggagtgagttggtattattggaagggtttcgagttttcggtgttttttacggaaatgaagttgagattaagaaattttcgttttttagcggggggaggttgagttgttgtttatttttttcgtattttagtatgattgtcgagtattgaggggtcgtttcgagagaagagttagggttttttattatttagtcgttggaggaagttttttttgttagcgatttcgtagtattgtgtttataggggggaggggaggggttcgtataggagtaataaaggagaaattgaggtattcggttggtatcggttttgttttattattggttttggttcgggttgtgggtttttatttttcggggttgtagtcgtatttggaaaggttgtattttgaggatgatattgtagtggggtaggggttgtagggagggtagggcgttttcggagggtagtagcgtgaaggtttgtagtagtcgggttagtattacgaagagttttaggcgcgttagcggttcgtttaggtatacgcgggtatcgtagtcgaaggttagagttttggagtttttgtttggttttaggaagcgatttgcgggcgggtggataggtgggtggggaggcgtttagcggtagcggggattagtttttattatatttttacggtaggttttcggttttttatatattaggttagaatttatgtggttttttttagatcgttttatttaggtgggcgttttggaggttcggaatgatgattgtgtttttagggatgtcgtagtcggagatgttgaagggggttggagttagaggttggttaggatttttttgggttcgggttttttttatttatttttaattttcgggagttatttgttgggtcgtgtggtgcggtggggtaaggttaagggtataacgggtcgtaggcgtagtatttcggcgatggtggtattgagtaagggtagtcgtgtacggtttttgtaggggattcgggagttggaggtattagggtttagttcgtggtttagttttttttgtagtcgttgttgaatttggggaatgatcgggtggagttttgttttagtagtttatagttgtttagtttttagtcgtttttttagtaatttagtgagtttgagtgtcggtgaggtaagtatagttttagtcgtatagtgtttagagttgagtgagggtgtttatcgttttggttaggttgttgggaaggagttttttgtttgtttttaggacgtattttagggtggtgaagtaaaaaaattacggtttaggagagggtgtttgttgtggttttagtgttatcgattaggaggtttattgtagttatgtgtacgtgtttttttaggagttgtttagagtttttttttatgttcggttgcgttattttttggagtatgtagtttattatgtttttttattggtttgttacgaggtttttttgtagagggtgaaaggagcgggttgagcggttggtttggggagaggagtatagagtggtaataggtttataattggggtatgtaaaagaattcgttttatagtaatgttgaggtcggtagtattattggttgtgggtcgaggggaggtcgtttacgtatagtttttattttgtgttgttttagttgtatttttacgatgtgattttttttttttatggtttgttttagttttcggagatttggattggggaagaattgcggtaggaagtatgagaatgtagttgtgggaaggagtttttttttttattttagttttttttttataatttaggggtgtttaggttttaggtttttattttgagaaagggaattacgtttataatttggatggattagtggttttaggtttttaatattttttggatatatttgtaataggtaggtattaagttgtcgttttgttagaaaaggagggagtatttttagtttaggataaggagaggtttagggaggggttgggggtgggtttgaggggttgtgaggtattttgattttgttttcgaaggtgaggtaatagatgatgttgtaggtgaggagagagaatttttttttaatggttataggggtgtcgggttgggtttttatgcgttgtggagaaatagtgtgagtttagtaggtcgttgtgtagcgggtagggcgggggttattgtgagaggcgaggttgattcgaggtggttttaggagtttagttttattttatagaatttttgggttagttgttttattattggttttatggagttacggatgtttagtagtagggttgagcgggtgagttttttgtgggttttttagagtagggagtagttttttaaggataggttcgggtagtttttagatattagtttgtttgtaggaggagttgggggttggagggtgggaattgatgaaggtagttgagggtttgatttttttcggtttttttaatttttgttttttttttattagatatgtttttttaagagtttttagggatttggattggggatgttttaaaggtggtttatatttgaggttgaggtgggaggattatttgagattaggaatttaagattagtttgggtagtatagtaagaatttattttttaaaaaaaaatttttttaagaaagaaaaaatgtttttagtttttataggtaagtggtttaggtttgttagtaaagtttgtttattttttgattatggtttttttaatggtttttttggagtttagtattattatatttgggagatagttaaagtagcgttagcggagagaggatttttttcgttattttcgtttttttttatggtgagggttagagcgagattagttttttattttgtagtttaaggtggagtttgtagatgggttcgaatttttgagttaggttaagtagatagattgggaggtcgggttgtagtaagtgtaagaagttcggggtaagaggcgggaggtggaggtttcggagtttttattagttttatagtaggcgggcgttagttagtaggggtagtagtagtagtaggtttaggagtagtatggcgagacgttcgttagggttttgaggtgttatttatagtttaagagttttagttattttttttgttgtgtagattgttttggggttttttttgattttatttttaggtatttttttatcgattcgtttatagagtggtttttttttggaatgatattagttttattggttttgggacgttcgtattttaaaaaaattgattatttattaagaagtaaggaagggaaatgtaattttgattttttttttgtatttagagttagttttttggttttatattaattgtgtaggtaatagtgttcgtttttatttgggttttttttttttgttattttatcgtgggttagtttattggtatgatgtttgttttagagagaaaatggtagtttttgtttaataggtttttttgaatcgtttgaagaataaaatgtgatttgtgtgggttgtttgttagtttaagttatagatagagtaatatagtttaagtttggtttgtttggggtattttagtatatataggtattttagtgtgattgttattagtgtttttttttatttataaaagtgtttagaagataaaggaggaagtggtttttcgttgcggagtaatagtatgtattagatattgttttaagtgttttgtgggtatttatttaattttttatagttatgttttatatgtaatacgggtattgttcgtatgttgtggagggtaggattttagtttggaaatttagttgtcgaatatgtatttttagttattaggagtatttttttttggttgaaaggaaaatagtttattttgagttggtttgagataaaaaataagaattggggaattttatagaatttaggaaaaagaagtagaggaggggattttattggttttagaaagttaaggatagggaatagaaaaagtttcggagacgggcggttttttcgttttgtttttttttttttttttttttttttgtagttaagttttttgtgtttttaggtataggtagaatatgattgtttttaggattatagtttataggttttattttagttagggaaagtatggatttttagtataattgggtatgttttttttaaagtttaaagtttttaggaaggggttggatagttatagttggattaggattaagggtttagttttatttggggaattgaagttataaggggtgggggttttattggattgatatttagagattatttttgtgggtaaggaggtagtttggggatttgggaagaggttatgttaaagaggagtggtagggtttagtgagaggttagggttttttggatggtatttgagaggttagaggcgatttagttttatatttttttttttatttttggttttgtgttagattttcggattagtgggggtttttttttttttagagtttttttagattgtgttattgtagagttagagttaagattttggttgtgttatttattatattggcgagttcgttgttgttgaatttatgattaggattgagagggagaaaataggattgggatttttggggttgggtaatgatagttattgttttttttatggttgattttttagatcgggttatgttttgttgtaattgaatttttggtttcggaaaatgggtttatgttattattatgttgagtagttattgggagaaagatttgatgagtaattatagggttatgtatgtaagagttttaggaaatttttgttatagtgggaaaggtttaaattttttaaagttacgtgggataagatagtgtttatcggaaaggagcgtatttggaaggttgacgtgtttattatttgttttattatttttattttttttattatttttaaatttaaatttcgaatgtggttaattatatgtaatgtttttaaaggtattttgttttgttttcggtttttgggtttttgtatattttttttttgttttagatgtttttatttatttttgttttttgtttggtttttttttagtttttagagttttatttggaggttatttgttttaggaagttttttttgtttttgtttggtaatgtttttgatttggttagatgttttataggattatattgttttttgatattatattttttatagagggtggggattgttcgtttttttatttgtttttttagcgatgagttttggagtgagtagttgtatttttggtatttggtatagggtatggtatgaagtgaaagattttcgaatttttgtcgaatgattggatggtaggttgttgaattgttatgatttttacggaaattgattttattaaatttttttggatagacgcggagttatttttgaagattttaggtgtgttattaaatgggggaaagttaggtaggttcggtgggaaggggagattttaggagaatagcggtttttttagaggatttataaatatattaaagttagatttttggtttgtttgaaattagtaattggaagaagatattgtcggatttgaggattgtataatttcgggaaagttattttattttattgataatagaattaagcgttagtaggtttttaatagttcggaatttagttaaaatttgtagattttagaatcgttagtagtacgaggatagagtcggggaggtgtagttggataatagtttatgaggtagaagagttgtgttataggtgttagttgagtataagttttgtttgaggtcgtggtgattggcgatagtcgggtagtggagggttttggaagttgaagggtggttttggtatggattttggtttttggggtgtaggtttttgggttttagttttgttcggggtggttttgtgaagtattagatttttagcgggttatttgggaggttttagtagagttgaatagtttaagggttattagggtttagagagtttaaggttatgttaatttggtttgtttagaattgtatcgggtaggggtattgtttttagttttagtaatatatattgatatttcgttgttaatattgatattttgttgttaaaagtttttaatatgttttggttttaggttgtgtttatgaaagcggatatagtagtgtttttagttttatggtttttaggtttaggttttttttagcggaggtgggagggtagtttttatatttggtatttttgagtgttatatttttggaggaagtcgttgagttgggtataggttgttcgttggcgggtgtttcggtataggcgtttagagggtattttttcgatttagttattcgagtttagtaggtattgggggttgtagggggtaaaggggtagttagtagggttcgggaggatggtaggtggaaacggagagtataggtatttggtttttgaggggtaaggtttaggtggcgaggtatggggaggataagagattgaggggattagatgatttattgtttttcgaggttataggtggttttatttagatttatgattaaatatttttttttaggttttaagcgaaggcggtaggaggttcgaattaggaagttgcgtatttgattagtagcggttttgatatttttggttgcggggatgacgtgcgtaaaagtggttagaggggaagagaaggtgtagggtgagtttaggttggggattttgtgtagatttttttattttattttcgttatttttatggagaggtgttattgtttttttatttatggttaagtttaaggtttttgatagtttaaggggatttttatatttttagatggttaggttttcggttatattttagtttttttgtttttttttagttttgttcgttttttcggtttgttttatattgaagtgtaggatttgggtgattttggttttaaagaggcggaaagtagttttgttgttttttcggagaattttaatttggaagtttaagagggggtgaggagaagggggaaaggtgagttattttgaggttgagagggtaggaagttggtgttagagtaaataggttgcgtgtatgatttgtaagaggagtaggttatatttagagagattaaaatagtcggttttcgagggagggttaggttagggtttcggtgggaagattgatcgtattttatacgggggtagtagtaggtaaattttattttgtagttattttcgttttgtagatttcgttttagggcgcgacgttggcgagggtatttttttgaagttggggaatttattagatagtgtggggggggtttcggttatttcgtttttattgtttcgttttaggtttttagttttatttttagtatattggtagattttagtagaatataaggtggttaagagtttgtttttatttggtgtttcgtaaaatatagaatatttgcgttttggagaatagagaggagttagggtataggtttttttattttgtttttttagttttagggagttttagggttttttgtttttttattatttcggtgtttattgttttataggagggtatttatgttaaagtttttttgaattttagggtgttttgtagtgtttatcggggttgtagtagtcgtatagggttgcgttggtcggttgtattagttttatcggtattttttgtatagttttaaagtttacgtattttcgggaggtggggatttggttaagcgtggggaggagagatgagggatttattttttgggttttgtagttttttgtattgggtttttttggtttgtttttgtttgttttttattggttttttttttagtgttttttatattttgttatttttttatttagagaatttttaaagttgtttcgtaaggtttttggtgattttattttttagagggtgattttgttttagtttttattgttttaggtttttagtagagttttgtattatggacgtgttttttgtgaaattgtttttaagttaagggttagtttttggattatttttggttttgatttggttattttttacgttttttttttcggaatttttttttttagagtttttttgtgggggttttaattattttttggtttttattaaattaatttaggttgatgatttttaaattgaatttgtagttttatttttgtattaggattgtggtaggatttgtaagttttttaaggtattttgtttgtttttaaatttattcgtttttttcgcggttttatttttgttatggatattattgggtttttttttatttgttataatttaattgtaggttttgttattttgtttgatttttcgatttaggttttaggtttgattttttttcgtgtttacgcgggtttagtttatacggtgtcgtgttagtgttttttttgagttaggttgttgtatcgttagttttttattcgggaattttgttggttttgtgttttttattgtgtttaatttagatgtgttagttaggtttttttagttgatgggggttggtttttttgtatatattgggtaggggtttttttgatttataaatagttggttaatgatagttattatattttttttatatttttttttagaggttatagtaaatgttttaaaattttttttgaaggtcgggtatggtggttttggtttgtaaattcggtattttgaaaggtttaggttagaggatcgtttgaggtcgggagtttaagattagtttgggtaatagagcgagattttgtttttattaaataaataaataaaaatgttttgagagtcgtaagagggttgataattattttagttaaataaggtcgtgaaaagataaatataattattatttatggttattattattttgtaaaggaaaatacgttttaatattaaaaaaaagataggaagtttaataaaaaaataaaggtagttttttaagttgaataaaattagtattaggaaagatttttttttaaattttgagggtttttgttgattggtatcggtttttgtcgtttgtaggtttgttttttattttgttgtgttttacgggtttatatttttgtttttttttttgatgatattataagtttttaagagtattagtcgttgatatagttgttttttgagaaattttttaacgtatatttagtaaattcggtgttatcgagtttttttttgttttatttttttttatttatcgagttaaaatatagtaggacgtggggtttttcggttttaaagtgatttacgtaacggttagagagggaggttagttgtggaaaaggggagttggttataggttttgtatatgatagggtttagtatttgggatagagggggttgttttgggtggttgattatattttttttaggttagtacgtagggcgtggaatttatttaggagggtgacgttcgcgatggttatgttagatagttttattttgtcgtttcgtttgtggagacgtgtgagttgtcgtttaggttttgtttgcgcgggttttagaagtttagttttagtttgggttttgtttttttttttttggtttagggtagttttcggcgtttattagatgtatacggtgtagtgtattttggatttttgtttttttattattttgggcgttttttttttgcggcggttttttcgatttttaaatagttgtaggggtgttacgggttgtagaggggtatttgggttatttttggttggaagtttatcgtatttatagtttttatagttttcgtttgtttttattgtatagggaagtattgtgaggagggttgggatggttattcggttttttgcgttagtttttgtttggttttaaggttttttaatttttatatttattcgtgtattcgacgtggtttttgattgttatttttatttgtaggttttggtaggtcgtgttttttatgtttaggatattgtaggtacgaaggatttggtttagtaaggggtagggagaggacgtgggatatgtgaggttatagatttttttggtgttatatttaagggtatttttttgggttacgggatttgaggtttttagttttttttttttttcgttattgtatagtttatatatacgagtggtattatattcgttataggcgttaggcgagatagagaggtaaagaagtaggggtttgtttttagaggttaatattttagattgtgttgggaagaggttggattgaaaagtttaggaaaggtttttggttaaggtttgaaggagaagaaagagtttgttttgtgggttaagaagtagggaaggataggaaaggtaaggggatttgtgtagataaggagagttgtttggtcggaggggtgggtagaggtttagttatttgagtcgtgggtagcggggagtgatttttttttaaggttgatttggttggggtttttggaaggttagtgttattgtcgtgtggatagtggattagataggggagataggaggtagagagaagttttaggtagggagaaggtcgttttagtatagaatttaggatgtagtattaagggttataggtagtaggggagtagaggaggagttattagggatataaggataggtttgggagaggggttattaatacggtttttagagtagtggttgggtttttggttgggaggggtttttattagttagataagagatatagaatgaagaagggttttgggatatgtttcgtttgaggtgttgtgggagtgggacgagtggggtttatggtttagggaagaggtttgggttgaggagtgggattcggagttattagtattgaggcgggtaaaggaaataataggtatttagagatggggagagtaagcgaaagtaagtagggggaaaaatatttaggacggaagtacgggatattaattttgaggtgtttgttttttttttcggattatgtgtttttgtttataggttttttattttatatttttttttttattagtgtttggttttattttttttttggtttttatttttagggtttttttgttgtttttttttatttttatattgattttgttgtttaaggaaaattttagtaatagaaaagggaaggcgatgttagaagggtataagtaaatttgtttttgcggttttagtaatttatttttttttttaaaatagttttattttttttttttattttatatttttataaagtttatattagtatatgaattattttattttagttttttaacgattttgtagggtgaattttgtgtatgttattttataagtgagaaaattgaagtttagagttttaggttacgtagttaggaagttagttttttttcgaagattttaggaagaagtgttgcggggattttacgggtgggaggttggggacggtttttggtttggttacgaggtttaggtgttttggttatttaggcgagggagtggtttattagggagtggtttatttgtagttttttttttaggtcgcgaatttggcggttgtttagttgtagcgcgtgggatttgaatttatttcggtttgtggagttgagagttatattgagatttttttttttagtggtgtgggaggtaatttagtaggtagatagggtatttagggtaattatcgtgttttagggaggttgagttaggatttaagtaagtttttggtttgaggattatttattttcgttagagttcggggacggtttttatttgggtattgcggaattttttttggaagttgttttgacgggtgagttaggtcgtagtttggtttgttatttttgttttgttttcgtgaagtaggaggtgtagtagggcgtaggttgtggttttaatttatagggttggggtttggggtatggggtcggatgggttgcgaggagtcggggtgggcgatacggtattgttttgagaattagtgattgagttttagtataggttatttgaaagtgaagggagattacgagtaaataggaaggtagggagaagagtttggttttttggtttttagttattttttgttgggtttttttgagttttttttaatttatttttgtttataattttattttttttttgagtttttatttagtttttttttttgggtatatttagggattttaaggttttttgggttttaggtttattgttaggagcgttttattttttatttttagttttttgggttattgttatgaggttgttgtgggtaatatttcgtaggttcgtaggggttttggttagtgttagggtataggtcgtgatggtagttgcgtgggtatttaggagtttagtatttgtttttttttttaaaaatgagtttgtttttgagatggaggttttttggaagaaaacgggaggagggttttgggtttggatttttgggtttttgaggaaaaagggagagagttgggggttagtagagggtagaaacgttattgaatttattattttttgttttaatggttttgtatttttattttggaagacggttagtttatgatgaagggcgatggttataaaggttgtgagtgttatagttttattattgtttattaaatttttttagtaaggggagaaaagatgttaaataggagggggaaggggtaaagagagtttttcgataggcgtttttcgggttagttttagtatgttcgtatttgtatgtttttatgtattattggagagaggttttggaacgagtcgttagtttgttgttgggatagaagttagttagatgttttttgtagttttttaggcgatttttttatttgtttttgggttaaatttaggatttttaatataaaggttgtgagtttggagggtaggaaaggagggttggggataaggatttgttttttattatgtttacgtttttaggtgtttggttatttatttttttattatattagttttgttttatttttgttttagttttgatttttttagaattttggaattatttttttaagtttattaggtgttgttgtttcgtgataattaagtcgtataggaattattcgtttttcgaaattgttggattcgtatgtagttttggagaggagaggtggtcgtttaggtgatatttatttttttgttgtttgagtttaaggttatgttttttatttttattaggggttttttttttttttttttgtagttttttgggttgtttattttttagtaattgtttttttttggttttttttttgtttgtttttgtatttagaatttttttggattagatttacggcgtggtttttggtttcgggaggtagtgtgttttattgttttgttttgtttaggtagcgggaagtagttagtgtcggagttaagtagattatggtttgttttttatagtttcgaggaagttttaagagggaggttacgttttttggtgataaggtttttttagagtttaaagtgtttaatggatttgaggttatatgggagggagagggtggaggtttgaggattttgtgttagaggtttacggggagtgggattaagtagggatttataggttttatatgaattcgaaggtggttattgggaagggattaaagggtatttttatttgtaattttgacgtagttgttaaagtttttattagggattatattgggattagagttgttaggtatttttaaggttcggtttcggtggtttggggaaatgggggaagttggtagtttgttttgttgtttatattttttattatttgtatttatttaggaaattaatggttggaggtagagggttatttatttaaggggttgagtttatagattagtttttttttatggatggttttttttttttgttttagggaaaatatggttgtgaggttatataggattatagtttgttttgttagcgtagatttttttagaattttgagttttaattttagggatagagttggattagaattgtagaagatgggaatagattaaggtattggttcgggtgttgggtttttggtttggttagtagagagagtgttgagggtggaggataaagttaggggttcggggatttatatttaggggtgttttatttattttaatttgtagaattttggatatcgtattttttatagggaattcgaaggattttcgagttattatttttagagatatagcggcggttgtcgtgggtattatagagaaggtaataggtcgggtagagttcgtaggtattagtatttgttgggttagtttttcgtttttagttaggtatagtttttttattggggatacgtggacgtttatttgagggtaggaaaacgaggatggttagagttttggttcggttagtttttttattttttattgggttttggtttttttaatttttgtatgtttaggtttttatggggttttatagttaggtttttatttaggtagttatagaggataggtcgtagttttagttgtttaaagcggcggatagatatgggtaggcggaggtgtaggtggaattcgcggaatattcggagttggattggggtggttatatataggtttgagggaaaggaagcgtgggtataggggtagagattagaggggttattaaagttttagggttataggagggaggggtgggggtgatttagttttgttttagttcgtttttgttttttggtttacgttagttgtacgttggtatagatttttttagattattggattttttttttatattaagagtaaagggaatagggagttggggtatagggaaatggaagcggggttatttgaggtttagatagggtgatattatttttggttttggataggtttaggttatggattttttacgtggttagagagtcggggagttatagtgttaatttgtgtagggaaaggtagagaaggttcgtttatttcggttggtttcgagatatagtatagagaaaaggtcgggtcggtatatatttttatatttgaaagcggtttattgtttttattttttagagttagttttttgggaagaagttgcgtacgggaatgttatttttattaattaggttttttttttgtaggatttttagggttgggggattacggtggacgggagtgaggaggggatcgttttgtttttttaagcgtcgttatttgtgttttagttttatttagttttttatttcgttggaggttcgtttggtttttgtttttgttttttttgcgtagatttttagtaaattggtagtaggataggaagggttttcggtagttcggttgttgtacgcgggttgttcgttgttcgtaggaacgtattatgggtagacgtgttattttattttggtagtagcgtttggttgtcggggaagtatattgatttattgtagggttaggtgggggtgagtatgagaggataaaaaggatatatattttagttttcgtttcgattttttgagattagtaatataagagaggttgttggagagagttgtttattttttattcgtaatttcggaattcggatttttggttttaaatattatacgtgggtttagtaaggagtcgaggggtagagaggtagatttttaattcggattttaggtggagagtttaagttattgtttaggtattcgtaatttatattttttattaatcgttttttggaagtttacgttttttttttttcgggttgttttttttttgggatagtttagttttggtagagagaaaggttgtagtttagtcgttaggtattcggtttttttttttttttttttttttttgtttagttttttttgttcggatttttttagttggtttttttaggttttttttttttttttattttttcgttatttattttttttttttttttgtttttattttttttggataaggtttattggtttttattagaaaaggttaggttcgttgtttggaatatttgaagggtattgtttttatttttaggattatagtcgaggttatagttgtttatagttttaaagatttgtaagaaaggtaggaatgttaggagttaagtgtggttgaggggtaggattgagtattcggtataggtgagagggtagtatatggggggataggaaaggatatagagttaggagatggagattatagggttaagtggggaagagattgtggggagttttagtgggatttaggggttgcgtttaaggtttagggaagtagggggatgagttatggaggggtgagagagttgtggagagggtttggataaattttgtttatgttgaggggtttgtgggatttgttgtttgtagtatatagagttgtgtttaaggtttttagcgttattagggttagggagtcggtttttaagtggagttttacggatttttcgtttcggtattgtttggtatcgtttacgttgagttttagttggtaggggcggtaggtgggggcggttagagtgggagagttttttttagtttcggtatttttattgtttttaagttaaatttatgttttgttggtaattattttgtttttaattttttcggtataagtgttattttttttgatttcggttattttgttttcgtaggttttagtttggatatttattcgtagggagttggttattgggtggtttttatggtagtagaaggttataaagtagaaggagggtgttaggtgatggtttataaatatcgagatcgaggttagggtttttttgggttttcgatttatgaatacgatttgttttcgggataggatttgggttaagaatgggagggataagagtggttgtttttttatgggatagttttagttttgaatttttttagttttatttagagggtttttttttgtattttagttttttttgattttttagtttatgtatattatgtagtagtaatgagaaaaggtggttttattgtttacggttcgtaagtttaggtttagagtgtttttaatacgaggaggtcgagaattcggtcgtttaatagatagaaattcggggttttttgaaggtggggttgttatagtgagtttggttatcgttggatgtggggagtttgtagatatttggagagggggttaggtgcgaatagggtagtagtttagagttaagtattttattttttttttaagttaggttatggatttttgggattttagtttattttttttttttttttttattattttttagggggtcgaggaattttattgagagttgtagttttgagatggtttgagggataattattggaatgttgatttggtcgttttcgtttgtgttttgttgaatgttttggattttaggaatagatttaggagaagatatcgtggtagaaattttgataggaatgttagaagttggggagtttgatattttacggattaaggtttaggtaggtaaaggagggtaggtaaaagagagtggttagattttgagtttttttaattattatattttttttatttattttttttttttggaagaaatttgtagtaggaagggggttttaggtataaggtgtcgtttggttttgttaagatttaaggagaagggagatgatataaaatattaggatgtgagttttgttttttttatttttttatttgtaagataaaggatagagagaggtgggggatagagtttaagaagagagggataggaggataagtggggagtggtttgagtggtttttttttataagatagtgagtttttagggtataggttgtcgtatttttgtttgtgttgggaaaaggatttgtggggtgtttgtataaattggttataaaaatatgggataataagttgtggaaagttataagaggtttttgaggagaaaagttttttaattgttatgtttagagcgagatttgtttttttttatttgtaaatattgtatttaaggagaaagatttttttttgaagtattggaatgtggatagacgtgtaggtttttagttaagtttatttttattagttatttttcgataagttaaagatatgttgtttgagtataaaggagatttatttaaagcgtttttgttgtagattatgtttgtgacgtattgttatttttttattgttttgttttgaatatttgttttttagatttaagttattgtatttaataaatagtgtggagattagagttttgagttttttgtagtttttattttgtaattggttttttggtttttattttttatgaatttttaatttgtttttttttatttttttgttattattagattttaggtattttataggtggtgttgaggttggtttttaatattttggcgtttaacgtggggtttaaaagaatttggtgaggaaacgtttaagtatgtgaaatagaggattaacgaataaaggatttttaaggatataaaagttttaatttttataggtaagcggggcgtttagagaaagttagggatataatgggaaaaattgaaagtaagtatattacgtatttgagttttttacggtagttttttaagtatgtatggtggggtaaaagttgatacggaaaattttatggatttgttttatgttatggaataattttgtttttggtttttaaaataggaaattttgaaattaaaatattaagaaggagttggaaaggattttaaaagagtatatagagaaggaaaggaaatttttttgtttgtttggtcgttttggttattggtgtatgtagtattggagtttttttagatagataatgaggttgagttagaggaggagagagaggagtttgataattagaattttgaattatttttatcgagtattaataaaaaggagagtttgaagatgatttatgttaatttttttagtttttttaaatttatttaaaaaattgtttagtttacggtttttgtagaggaatgtttagaatggttattttttttttagtcgagtgggtgtagggggagggagttcgagatttggtttatcgtgtttattattgttcgatttatagtttattatggagatggggtaatttaggtttattttatagttattatagtgaaggagtaattttttttaaaatggatgattcggcgtttcgtttgggttgaatagtggtcgttttttaaggaaaagttgggggtgttttataaaataaattattaaaaaaaggatatattttatttattttttttttttggaattttttagtatttgtaattaagaaaaagttcggtagatggcgttaacgttgtaatttaatcgatgggagttttataatttgggtttttattttttattgtgttttttaaagattgatcgtttgttattatagatttaaaagattgtttttttataatttttttagtagaggtagattttaaaaaatttgtttttattatttttgtcgttaataataaaaaatttgtagttaaatattattggaaagttttgttttagggtatgttaaatagttttatagtttgttaaatttttgtaggtagaattatttagtttgttagagattagtttttagatttgtgtagtaaaaagtagagattaatttatttaatattattaatttttgtaaaagataattataaatgttgaattatttatagtatttgataaaatttaaataattatttttttttagtatttgaaaatataagtataggatagagttattaagttttaaaaggtttaaattagaagagatttttttaaaattttaaataatttttaaaaattgttagaagatattaattggatttggtttaatttagtaatttttatttatgttatgtttaatttttttttaatattgaggggaaatattaatttacgtagtaatagagaattaatattcgaggttatgaaagagttattagtaattgaaaataaaatttagtaagtttaggttagtaggattgatttagatttgtttttataatttattgtgttttttattttatattaattatataataatgggggttattgtttaaaatgatgatttagttaaatggttttttttgttatataatattataaaagtatttatagtatatttaaattagatggtaattttaattggataggtttatatatgaattattaaattttgtggtattgagtttaataaaaattatagttttaataaataaaaattaggttaaataggtatttattaatttagttatatgatagattaatttaataaaatttgttggatgtattaataattattattttaaaaattttttaatttttaaaattaattatataggtttttttaaaaattatttgtgatgtttttttggaaggagttatagttgtttttattggtgggtttggtaaatatgaaaaagtaatagtttggtggagattatataatttaattatttgatttgaatttattaatatttagagagttaaggttattttgtgtatttatttaaaaattattatagttttaagtttgttttggagtttattttgtgtggtttttttttttaattttaataattattagattaaggtatatattttatttttattatatatattcgagtttatagttttttgtttggtttattggtttacggtaataattaagtagatttttaggttatgatattattgtttgattaagttatttaattatatcgattattttattaaaattggagaaatttatttaaataattttaatttatatagaggttggttaaataaattattttataatgtttagattattagtttataggtatatatttttttttaataggtgttaatcgtaaagaattggaatttagttagttttggtaaatagatgttaaatatatttttaaattttaaaaattaaaatatgtatatatatttattgttattaatatttatttaattattatatatttaaaaaaataaaagtaaaaaaaagattaagataaaaattaaaaaaatataaaaaaagtaaaaaaatttaaaaagttataaaaatgtatttttagtaaaaaaattataaaatataaaaagttaagatatgttaaaaattgtttgtaaaagttataaaaaaagttataaaaaatttatataaaaaaggttgtttaattttgttttaaagatttaaataagttttaaaatgataattgtaaaaaatttcgtgtgtaaacgtatttattaaagttaaaaagatattatttagttttttataaattaaatattaaaataaaatataagttttttttaaaatattaatttgttttttaaaaattgtaaaaagttttttaatatagacgttatttttaaaatttttagtattagtttaaagattatatttttattaaaggataaaaaattaaaaaataaaaaaaaatttgaattagtttaaaaaagattttataggaattatagttttaataatgcgatttttataaataatataggttttagatattatattaaaaaaataaaagtttaagttaaataatttatttatttttaatttttttattttgtttattatttatatttgttatattgtattaagttcgtattttaaattcgttttttttttgttttgttattttaataaatattttttttttagtttttaataatataattgtttagttagaataaattaatatatttttagtggggttttttattaataatatatagtaaattaagatgttaagtaatattataggttatttttttattaaaaaaaaaagttattaattatatttatgtttgttttttgttatttattaattttagaatataaagttaaaataaaaatagtgattttttcgtttaataaatttgtggttataatagtttaaaattatatttattgggtatgtgttttatttttgtttttaattaggtttgttatatggttaaaatttttagttgaagtttatgttaataatagcgtttggatttttaagtttataaatatttatgggtttttttatttaaaggaaaaaaaaaaaagttaataaatgtgtttataggttattagtttttttttttttatataaggttaattatcggttgtttaaaaggttatcgataatattgattagttaaaattttaggttataattaaagattagtattttattatttattttttggatggagttcggattatttatagagtttaatttaattaatagtttaagtttttaaaaaagaggtgttaataattttaataatggttaaataatttaaaaatattaattaaaaaaaattatatttttgattatattatggtattataaaataatttttatgaaattgttattaattggttttttgaggggatttttatagttaattgtatttattaaaataataaatataagataaaattaaaatagaaattatattattaaaaaggtaatattatttatattgaaaaacgtgtttatttttttataatttggattaattttagtatagttggtttatattttaaaataattaatttaataataggttttaaatattttaaattatgaaagttaataatggtttaattttatatttaagtttagaaaaaaatatattatttttaaaaaaaaaaggttaaaaattttaatttgcgtattagtttttttttaataaaatagtgtttatttagagttgtgttaattttttttttatgttaatggttaaaaatattgatattcgatttaatttttaaattattatttgttaaaattgttatttttttatttgtattaattttacgttcggtgtaaaaatatttgtgttattgataaaaattaagaaaggagtttggatattggttttttttaatagattttagaaagtttttttttttatttatattgttataaaaatgttttaaaaaaaagtgtttattaaaataaagagatttatttttatttttataatagttttatgggttttattgtagttatagttattgttgcggttgttggaattgttttatatttttttgtttaaattataaaatatataaatagttaataaaaaattttttaaaattgtggaatttttagatttaaatagattaataattgataaattaaataaatgattttagatagattgttatttaaatggaagatcgtataataaatttaaaatattaattagaagtataatgtaattgaaatatttttaatttttatataattttttattcgtataatattattaaatattatttttaaaaagttagatattatttaaaagaaaaaaataaaaatttaatattaaatataattaaattttaaaaaaataggtttttaaagtattttaggtttatttaatttttttgtttgagattgatatttttattggagttattgacggatttttaaatataaatttttttaaatagattaagattattaaatgattaattattataaattttattttaatgtgtatttgtttatgttgtttatttttagtttatagatgtaaaagatatttttgaaaatagattaaatattataaataagttataatagtaatagcggttaaaaaaaaaaaaagggaggggggtatgttgggaaaaggatttgtggggtgtttgtataaattggttataaaaatatgagataataaattgtggaaagttataagaggtttttgagaagaaaagttttttaattgttattatgtttttatgtttagagtgagattttttgttttatttgtaaatattgtgtttaaggagaaagatttttttttgaagtattggatagatatgtagttttttagttaagtttatttttattagttatttttcgataatttaaagatatgttgtttgagtataaaggagatttatttaaaattttattgttatagattacgtttatgatttattgttttttttttattgtttttttttgaatatttgttttttagatttgagtgattgtatttaaaaaatagtgtggagattagagttttgagttttttgtagtttttattttgtaattggttttttggtttttattttttatgaatttttaatttgtttttttttatttttgtgttattaatggattttaggaattttacgggtggcgttgaggttggtttttaatatgtttgtgtatgttgaggtttagtacggggtattgaataatatatgtttattggaggagtgaaggaatgagtagaacgagtaaagaaataaataaatttagttagggaaaagggtcgagttatagagatagagttggagagaaattaggttttttgggtgttttttggttttgagtttgagatgagatgtgagaagtggggtggtgttggtgtcggaggatagagggttagtttagaggttagaggtaagggtttggggttataataagggaaagttatttatttggatatttaatgatggttgtagtaacgtagaggcgtagtttttggaggttagtaatgtttatatttagtttttttagggcgttttggaattttgtttttgagagggaaatgtggttttgtttatttattagttggggtatagaaagaaataggatatagggtgagattgagttttttattttattttttttgtttttttttttttttagtttttatttttttttttattttggtttgattttttagttttcgaaagaaagtttttttattatttttatttaggagtttaaagcgtatatatgttattttttgtattggttttttatagatgtatttgtcgtggtagagagaagagggtgggttaagggttggggggaataatggttcgagggtagggaagtaggagtttatttatattgagtagggagtaggattcggtgttggtgggtagaggtggggagggaggtattatttggtttggatgtttaattgtattttattaagatggtttggtatcgttaggatgtagggttttttaggggtgatttttattttaaagttgggaaggattgatttagggtgaagggataggtaggttagattttagtttaaagatttttttttgtttagggttgtggtatttatatttttttgttttgagttgtttttagtatttttttttttatttttattttttttaggaaagtagttgtttgtttttttagtttttagtttttattatatttttttattttaaattgggtgttgttgttggattttaggttatttgagaatcgggttgagattttttaggtttttggtttgagaatggataaggaaggggtttagtttatttgtatagtggggtacggagagttagtagtttgtttttttgggaagaggattgtgggggttaattagaggtttaggaggttgagggttagggtatttggggacgtgtttttgtgtgggaggtggagagtttaataggaattggggtggtgtagtttgggggtagtttttatattgggagcgtttattttgagatgtttgggattataaagttattttggaagatggacgagggtatgtatatttttttttttcgtacgcggaggtcgtgagagttttgtaaggggagaagtgtttataggtaggaggttatattagtggttaggattaggaaggttagaggtcggggatttatttttattatgattgtgatggtgttagtgttcgggcgtattttttgatttagagtaaagattcggtatcgaattgggagtggaggaggagagaggtgagtaggggtttatgtgtaaggggagggtgggttaaattttatagagggagtaggggataaatgttttttaagtattttttttgtgtggtatttttttttaggttattttatttagggggtattaaatttattttgagagggttcggagggggttaaaggttgaggttttggggttgagatttatttcgttggttagggttgtaaatgggttggttcgtttgtaaaaagaggtgttttcggcgagaggagaagagtaggttgatattttggatgtttgtcgttttggatagagagttttttagttatggcgaatgggttattagttggattttagggtttttgaggagttgatggaggttatagtttttcgtattttttaagggtatttgttaggagagggagagggagagggagcgggttatagagtaagagatagttgattaaaaaggatagagattaagggagaaacgtggaaggagaatgttagggtgggaagataggaggggaggaggttagtgggaagatgatgatatttataagatagatgggaatagggtaggaggtttttataagtagtaggagggtatggggtttggttatttggagattgaggagtgcgaagtttttttttgagttaagggtgaagtttatttttggggagtaggggatattattacgagatgggttttttaggaatattgatttttttattatttgttttcggggtatattttggagttgtatttttatcgatagggggatttttagatgaattatagaaggagagaataagagtaatttggggagaatagataggattagtagttagatttcgttttgatatttttatttttgtttttttttatttttgaatcgggtttcgatgttagttttgttttaatttaagtatttagtatttcgtttttaggatttgggtttttgtagagataaggtgaagaagttggatgtttagattagtttttagagtagttttatggttggaggatttaagagaggttagattcgtttgtttgtttgttattttttggttaagttaggtttcggggtagagttgattttggattttgttttttttttagtttagttaagttgggaaattacgtgatagttaagaagtgtaattggttttaggtttagagttgtgggggtatttcggatatttgggtgtttatgggaaattttgaattttggtttagaaataattttgttttttttcgttaattttttttattttagtgtttgagtatttttttttattaggtatatttgtattagggtataggtgtatataagtttatgtatatttgggcgtataagggtttaatatggtttacgagtataggatatttaaaggtttttataaaataatgataggtttttaagatatttgttttttatttttattttaatataaattgaattatattaggtttttgtttttttaggttttaatagaaatttcgtggtttaggagattaggtatatttttattattttatagggagaatggtttgaacgttagagtgaatttttgattttttttttttttgaatgaggtaaagtttagattttatttttatttttaaataaggtatttaaatatacgttatagtaaataaaggatatttagaaaatattataggtagaggtattttatttggtaattttaatatgatacgtagagaaaagaattttgtttttttttattagtttttttagaaattttatttttttattttaagatagagtaataatagtattattttatacgaaagggaatagttatagttttggtattatttttggttttattttttatggaagggtagagaagtattgtttaaattttattattgggttagaaattaggtaaatagtagtagttatatttgattttttgtatatacgagagttcgatatttattttggtttttaagtttttttaaggtgattttgttttagttattattatgtagtttttttagttttttttcggtttattttgaggagttgagtaatgatgagtagaatttttatgtttttggtaggcggaggagggtttttgaagtggtagagatgttgtgtaggagaaagataaggttggagttagacgtttaggtttaagttgtgaggagaatttagaatttgggaaggggtgttttcgggttttagagaagaatgagagttattggtttttattaggaaattaagtatgagttgggaggaaattttattttgggttattgttttataatttgttagaggttagggaaagatttattagtttattagttgggttttaatgaggtcgtgtatatggtaggtgaggttaagtcgtattacgataggcgttcgtcggtttaggagttttgataggagtagttttcggtattttgtttttcggattatgttaaggatagtttggcgttttagagaagtggtataggaaaggggaaaggtgaataaggtttagaggtttgaggagttattaaaaggtgaggggttgtaggtttgagttgtagatgggatatttttaataaagtatttgatgaattttttagttttaggtatagttagttattagtttttagtatttcggacggtgaggattttagtatttattagatgtttgagggtagtgggaagttagtagagatgagggttgggttttgagaattattttttttttttatttattaatgtttatataagtttttagaaatacgggtaattatgtaagagagattggataataaaattttagtttggggtggttttgtgttcgtattaattgtttttgttggtgtagttgtttgttttaggttttttatttggattgttttttttttattttttttttttttgttattattattggtttagttaaatagttttttttttttgattatatgttttgatatatattcggttttaggatcgaggagaggaattagagttttttgcgtttttgttattgtttaggtagattgcgttatggtttttattatatttttttgagagtgtgtttgtttatgtgagattagtgttatagttttttaaatgtttttatatattttatgggttataaagtaggaggtttgagttagatatagttttttaaaattagatttttatttagtttttgtttagttgttttttagttttgggttttttttgttttaatgtgaatgtttaggggtattttagtttttattattttttatttttttagttttagtatgattaatattaagtttttatagtttttgttaggtttttgtgtgtttttgataagttattaagaattgaattttattttagggttttttttaaggtttaggtaagataggtttttttttttgtggggaggaatataaatttgggttattttattaaaaagaagagttagttttttggtagtttttttggtaggtttattaaaaaaataggaggataggttggatggaattggagggaggtagggaagtattagatgtttgattttggttggttttataagttttacgtgatttttgagtttttgaagttaaaggtttgtgttatttggttttgttggaaattaaggtttttataggttggaagtattgaagttagaaatttttgtattgttttagtatacggtcggttattataggttttgaggatttataagtagagatgagagatatggtttatttttatttttattttttattaatttttatttttaggatagtatttttttttttgttttattttttgtttagatttttttattttttatattttttttttttttttttttttttatttttttttttttttttttttttttttttttttttttttttttttttttttttttttttttttttttttttttttttttatttttttattttttttttttttttttttgttttttttttttatattattatttattagggttttgtgttttttttatgggatgtgggggtagggaaatttttttttttgtttttatttttgttttttaatttttttgttttttttaatttgtgttttttttttagtatttttgacgtatatagttatatattttggttttgtagtttttagtgaagataattttatgggtatttaagtcgaagtttagttggacgattttgatttttttttgtttttgaagttttttttgtttttatagagaagagagtgaaaagaggcgtattagggtaagatgttttgttatattttgggcgtttttaggtagggagattttgtttgttaatatgggggtatttttttttagtaaaggaaaaattgtgtgagaaaataattaagtaaatgattaagtagttttttttaattagttatttatatttttatttatttgttttatatatggtttattaaagagttaatataatttttaagattaggtattaagataaaatagtgattaagatgtaggttgtggttttaaaatattaatagtttaaattttgggtagggtaaggtggggaggagtatgggatttaatgtttaaaataaataaaaataaattaggatttttgtttacgagaatatagtaagaattaatttatttgttgaaaattaattaaaattttggataaaaatgttattttaaaattgtttaagattaggtatagtggtttatgtttgtaatttagtattttgggaggttgaggtagtaggattaattgaggataggagttcgagattagtttgggtaatatagtgagatttttttattcgttatatttttataaaaaatgtaaaaatagttaggcgtgggggtagatatttatggttttagttatttgggagattaaggtaagaggattatttgatttaggagtttgaggttgtagtaagatatgattgtaattgggtaatatagtgagattttattttttaaaaaaaattgtttagatattaaagagtttataggataataggaattattattaatataatatttaagtaggtcgggcgagatggtttaagtttgtaatttcggtattttgggaggttgacgtgggtggattatttgaggttaggagtttaatattagtttgattaatatggtaaaatttcgtttttattaaaattataaaaattagtcgggcgtggtgatgtgtgtttgtagttttagttatttaggaggttgatataggagaattgtttgaatttagaaagttgttgtgagtcgagattatgttattgcgttttagtttgggtgatagagtgagattttaatttaaaaaataaaaataaaaataattggggtcgggtacggtggtttatgtttgtaattttagtattttgggacgttaagggtggattatttgaggttagaagtttaagtttaagattagtttggttaatatgatgaaattcggtttttattaaaaatataaaaataggttagatgcggtggtttatgtttgtaattttagtattttggtaggttgagacgggtggattacgaggttcggagattaagattattttggttaatacggtgaaattttatttttattaaaaatataaaaaaaaaaataattagttaggtatagtggcgggtatttgtagttttagttattcgggaggttgaggcgggagaatgggtgaatttaggaggtagagtttgtagtaagttaagattatgttattgaattttagtttgggtgatagagcgagatttcgttttaaaaaaaaaaaaaaaaattagttgggcgtggtgttaggtgtttgtaatgttagttatttgggaggttgaggtaggagaattatttgaatttaggaggtagaggttgtagtgagttaagattatattattgtattttagtttggtgatagggtaagatattgttttaaaaaaaaaaaagtaattggaatatggagggtatttattaatttaggtaaatttgtttagaatatttttaaaagtaattgggcgtataaggaaataaaatttaaagagagaataaaaataaattttaaaagataagtaatagtggaattattttttttacggtttttttttgatgtcgagtcgaagttggattgtattgttgttattttagtttattgtaatttttttgtttgatttttttgttttagtttgtcgagtgtttgcgattgtaggcgcgcgtcgttacgtttgattggttttcgtattttgttagtggagacggggtttcgttgtgttggtcgggttggtttttagtttttaatcgcgagtgatttattagtttcggttttcggaggtgtcgcgattgtagacggtgtttggtttatttagtgtttaatggtgtttaggttggagtgtagtggcgggatttcggtttgttataatttttattttttagtcgtttgttttggttttttaaagtgtttagagtgtagtttttgttcggtcgttatttcgtttgggaagtgaggggcgtttttgtttggtcgtttatcgtttgggatgtgaggagtttttttgtttggttgtttagtttggaaagtgaggagcgtttttgttcggtcgttattttatttaggaagtgaggagcgtttttgttcggtcgtttatcgtttgagatgtggggagcgtttttgtttcgtcgtttcgtttgggatgtgaggagcgtttttgttcggtcgcgatttcgtttgggaggtgaggagggtttttgtttagttttttcgtttgagaagggaggagatttttcgttcggtagtcgtttcgtttgagaagtgaggagtattttcgttcggtagtcgttttttttaggagggaggtgggggggttagttttttgttcggttagttatttcgttcgggaggtgaggggcgtttttgtttagttatttttattgggaagtgaggagtttttttgttcggttagtcgttttgttcgggagggaggtgggggggttagttttttacgtagttagtcgtttcgttcgggagggaggtggggggttagttttttattcggttagtcgtttcgtttgggagggaggtggtggggttagtttttttcgttcggttagtcgtttcgttcgggaggtgaggggcgtttttgttcggtcgtttttattgggaagtgaggagtttttttgttcggttagtcgtttcgttcgggagggaggtgggggggttagtttttcgttcggttagtcgttttgttcgggaggtgaggggcgtttttgttcggtcgtttttgttgggaagtgaggagtttttttgttcggttattatttcgtttgggaggtgtgtttaatagtttattgagaacgggttacgatgataatggtggttttgtggattagaaagcgggaaaaggtggggaaaagattgagaaatcggatggttgtcgtgtttgtgtggaaagaggtagatatgggagattttttaaaaaaaaaaaaaaatagtggaattattaaaaagataattaaaaaaaaaaaaaatagtattttgggaggtcgaggtaggtagattatttgagttaggagtttgagattagtttggttaatagggtgaaattttatttttataaaaatataaaattaggtcgggtgcggtggattatgtttgtaattttagtattttgggaggtcgaggagggtagattacgaggttaggagattaagattattatggttaatatgatgaaatttttatttttattaaaaatattaaaattagttgggtatggtggcgcgtgtttgtagttttagttaattaggatagtgaggtaggagaattgtttgaatttaggaggtagaggttgtagtgagttgagattatattattgtattttagtttgggtaatagagcgatattttattttaaaaaaaaaaaaaaaaagggaaaattaaggtaataatgattatagtagttattttttagggatattttgattagagatattttgattagagagggatatatgtgggatattggttatattttatagtttgatttagggagtggttagataggtatttgttttataaatattatttaaattatatatgtttatatttttattttgtaatttttaaaggtttttaaaaataaaagttaatattaatatattaaaattaataaatattttttaaggagtggttttatttggtatgtttttttacgggagatttagttagggagattagtttattttaagtgagtgttagattgtttttttttttttttttttttttttgaaagattattattaattttttatttgttaaatttaatggatagattttagttttgggtttttttgttgttgtttttatttttttagagatagggtttttttttgttatttagtttggagtgtagtcgtgtaattatagtttattgtagttttaaatttttgggtttaagtattttttttgttttaattttttaaatagttagaataataggtgtatattattatgtttagttaagaatttttgtgttttaatttatttatttagtagagatgggattttagttatttagtaaagatggggttttattttgttgtttaggttggttttaaatttttggttttaagttatatttttgttttagttttttaaagtggtgggagtataggtatgagttattatatttagtttagattttagtttatattttattttattttttttttttttttagattattgttttgaattataggttttaatattgttaattattttatttttttaaaaatttttttatttttatagtaggtttttttttgggttatttttttttttttttttttgagataaagtttagttttattatttagggtggggtgtagcggtgttattttagtttattgtaattttcgtttttttagtttaagtaatttttttattttagtttttttagtagttttataggcgcgtattattacgtttggttaatttttgtattttttgtagagatggggttatgttatgttgtttatgttggtattaaatttatgagtttaagagatttatttatttcggttttttaaagtgttgggattataggtgtgagttatcgcgtcggtttttgggttttttttaatttaggtaagtttttttttgtttttgttatagatttttttttttttgttttttttttatgttagtggattttaaattttaaggtatatttaaaaagtatttgaggtagtttaaaaatgtagagttttaaatttcgttttaagagagcgtaatttattaattttggatgagttttaggaatttgtattttttttaataagtagtttatgtaattttgatataggtataataatttagtttatatatttagtaatattgttttaaatgatggtgttttttagtattgtggatttgattttattaatttttattttaaatttggagtttttaattacggatttcgtaggattagtaaaatattttttttttaattatatatatattttatgtatatgtggtaaacgtgtatttttttggagagagatagttatagtttttattattttttaaagattataaaaaggttagaaattatttttttatttattttttttattggattttattatattatagaattaattatttgttatttatatttttatgatttgtaattttattattattggtttagaattttttttaatttttatatttaattgtttaatatttttgtttttggatgttttatatgtattattaatttaatttgtataaaattaaatatattatttgtagtttaataattaaatgtgtttttaatattattagttacgtagttatttggaaagtttgagttgttttggattttttttttttttttatttttttttttttttttattgtattgatttaatttaggtttttattattttttagatgtagtatttttttagttgatttttttgttttatttattatttttaatatattattttttttttttatgatattttttattagtttatcgttttagtgtaagatggaaataatattgatgtataaggtttgttatgatttgacgtttgattgtatttttagcgttgtatgttcgaattatgttttatgattcggtttttttaaaagtttcgtttttttatttttatgatttgaaatgttttgtattatttgcgggatttttaatagggtttttgtggtattttagtgtttggtatagtgttttcgtttgaaaggtttaatgtttgttgaacggttggcggagtgattgagtgatagggaattttaggagttaggaaaggggttttcggcggtcgtatcgacgttttttattagttgtcggtcggttacggttttgttaggtataaggttgtatatttggttttttagtacgatgggcggtagcgcgtttttaaataggtttcgcgggaatagttgtatgagttttgagatagtcgcgcgcgtcgattttgggtagataaatcggtttacggatagggaattggggcggggacgcggttttaataaaattttcggttatcggaagcgaggttttattttcggggttgttatggttatttggtttatttcgaagaggattcgattttataggttttcgttttcgtcgttttttaattttaaaggttttcgggattaggtgatgttttttttagtttatatttcgggattttatggtatcggggaaggggtaggaatggagggaagagaatttgaaaatagggtttttcggcgtagagtagtgacgtacggttttttcgggcgttttttttagattaggtgatgacgaaaggagcgttaatttgtcgttttttaggttcgttagtgttgggaggggcggtggcgacgtatatattagtattattttcgttaggtcgggttttacgtcggtcgcggattggttttttttaagggtacgtacgttcggggattcgttggcggcgtggaggggcgtcggtggttacgttggtgttaatttttttcgtgaagtttatatttttttcgtttcgggaggggtttgttcgttattgtcgttgaatgattgtattatcgaaagtagaaaattatttttgtatttttcggtttttggcgtgtttgttatgacgttatagttttgcggaggtggaagttggggagttttgaggtaattggatttttgatttgagcgtagacgttttttttaattttattgtatttggaggatttggagggagggtgggtgaagggtaaggaaagaggtaggatgagagtttggtcgcggtggcgtttgaggggtttgaatgttttaaggttagagtttggcgattaggtggttcgtttagttttaaattagttatttttttttaggttttttttgtagaatggaaattttgtatttttgtttgttttaggattttatggattttagggggattaagagaggagttgagaagatagaggtagttgagtttcggaataaattatttcgtttagtattttttttgtttatagattttgttttttattttgggtttttttttttttatcggcgtttttcggaattgggttgtttttttttggatgtttaacgttagtattatggagatgttcgagttttgcgttattatagtttattttttattaacggtttaggttttaattttgattttagagacggatattcggatcgatattagtttcgggacgaggaggtttaggaaaggttggattatttgttgtgttggtttttggaatatcgaggtcggttggaggggtgagtaaagcgtggtaggtagtatatttggagattcgtatttattttttaaaattaggagagttaaagtcggggtgagaattagtttttagaagaaataagattatttttcgaggggagtattttattaatgtttgtgttagatttttagtttgtaatttttgttttttaggggtttaggttggttggtagaggttatagtgacgtggcgggggtatttgataaaattgttgacgatatcgtatgagcggtaggagggttggtagttggtagtttttcggttttagggaatattatatttgagtgaagtggagatatcgaacgttcgggtttagaggtttgttcggttatcgttttttcgggagtttatgtatatgggatataaatttgagtagtatatgtgtgtaggtgagttgtttttgttttatagttttttttttttttttagaggttgagagttcgttacgtttgttgttgtttttttttttgtgtagataaatttggaagttttttagatttttttggggaggttaatattaacgtggttttttgttttgtgttacgtagtcgtttgggaagttattttttgttttttttaggggaggtagattgtatagatttttaagttttatttatatagtttttaatttgttatgtggagtttaagatttttaaggagatgtatagttttggttaatggaggagtttttataggtttaggatcggggtgggtagggcgagagtttaggtttgaaggttgggaaagggatttggggaggagggtgaaggtagaatggagggtgtacgaggggttttattgattttttgttttttttgttagatataagtttttgaaatggtgggtttagttattttttttaggggtttcgaatgttgttgttggttttcgtaatttagacggttttgtttttttttttaagattttttttattatgaagatgtttgaatatgttagggtaagggaacgatgttgtagtttttattcgtatttttaaatattaagattataggtttagtatttagggtaatagtttgttttttttttttttattatttttattgtttattttttgtttttttttttgtttgttttagaatgatcgtgacggttggaatttttttgtgtgtatgaatttttgtgtcgttttttttagttttgtttagagtacggttgtttaggatgattttaggtgaggtatttagttttgttttttttttttggattttaggatttagtttttggtttttaattgatgtttttatttgttttttaggttcgtttatttttttttttgggagtttggcggtttagttatcgtgtttgtatattaagatgtattttacgtttttttgtttatatggtatgtggaagttatgatttaggattttttattattttttaagatttttttttttaaatagtaatgttttagagggaggtagttatatttttgtgtgtagataataaaagtatatttttaagaggttttttcgttgtttttttagttgagttatttttgtttagtaatttaagtatataatagtgttttgttgttttattattatgtttttatatggggtatttattgggtgtagaggttggtcgtaaatacgatgtttcgtcgtagtaaggtagtcgttgtttttattttggtatttagtataggtttttttattaggcgggttgtttttcgtagtgagcgatatattttagttaggcgttgaatgtagcggattattaggtttttaggggtttttgagagttttgttaattcggagaagggttgtggggaaagtagggtgaggattggatgtatttagtttgggtaggttttttttagttagtcgtttgtaaaattttaaattttaggtatttattatgtttcgggtttatttatatataattttaattagtttaaaatttagtttttttataaatttttttatcgtttggtttaggttataagttatttggattttattaattcgtttggttatagttcggatacgttttattttttgtaggaaagaaggagagattaaggtttgtttttttgttttaggatagggaaggattagattaagaaggtagttattttttatttttggggtatttatagggttggagggggttatttgggggattatttgaaggtgaaggttaggaatgttatagttttggtagggagaaaggggtggtgttttttatttgtttgagggtgtttgggagttgatttttagcgtttttagggttttggtagattaggttagagagtaaggtagtaatttttttaggtcgtagggtgtttagtgtattgttaaatatgagtttagtgaggagtaatttatggttgtttatggtataagttattcgttttgttagttttatagtgtttatttcgtttacgtaatttagggttcggagtatttgtaagaaaaagggtgggtattggatatattgttgttttttagtttttttgttttaattattgttttatttatttttattcgttgatggtatttaggaagtagtagtaatgattgattcgatagtaggaagcgtagtcgttttatttttttttgtatttgtattcgttttcgtagttttaggtattgtagagagttattcgttagttttttttttgttttttagtaggggtgtattgaggataagggttgagatgggggcggttagtttataggggattatagaggaaaagtttttatttttagtttgggagttattatttagggttttatttgggtaggaaaacgggggttgtgtatatattgagttttttggattagtttttttagttttcgggttcggagtttattttttataattgatatatttttgagttgtaggttattgatagggtcgagggtgggaggttcggttgggtgggtttgagttagacgtagtagtttttggatagtagtggttacggttgtaaggggaggattttttttgaagagggagtagattttaagatttggggtaagatttttttttttttagaagttttttttaggttgtggaagtttttttattataatttttattttatagttttttttaggttgggggagtttttttattataattttattattttatggttttttttaggttggaggaaatttttagattattgtttttttttgtttttacgtgtttttttggaggagaagggtttttttagtatttttgatttgaattttggttgttgttttttgttgaagttttttaagattttttttttatttattcggagtattttggtggtgatggtagttatattttttggttggagtttgattatggtgtggttataaggttttgtgaaaaggggagagtagggtagatattgttatggatttaggtattttgtttatattgttggtagaaaatagatatttgttatatttttatttttaggtaggaatagtttgaattttacgaggttatttggatagggtatttttgtagtggttggttttttgttttgtgggttttgggataagggtttattatataagattagggttgtgaatattttgttggtggagttcgaggagatttgggggtggttagagaggttaggagaggggggtgtgatgagtagatattaaaggtagagattagatatttatttttgggtaggaattaggaagtaattatgtagagtttattagtagagaggggtaattaagttaagcgattagagtagattttttggggtggtgggaggaaggagtgaatatgatgtggtgatgggaagggagggtgaaaaggagggtaagaggggaaaatgagggttttatgatgacgtaatttgttttggttaagtggggaaaatggagagagggtttgtttttttttattttttggagtttaaatttttattatttttatttgtaggattatttttaatgcgttgtgatgtttttgattttttataattattattttttttgttgagagagattttagttcgtttatagattttatgatgcgtcgttgaagagtaaaggatagatgggaggaggtattatagggatagatatttggattaagtttagtagtatttagagtaatacgatttttttttttttttttttattatttttttagtatttatatttgtttatttggattatgtgttgggtttttgttagtttttttttttagttgtaatatttaggtaggtcgattagttggttagttatgttaggtttttttaaagtttttagttttttggttagtttagttagggtttgtttatgggttttgggtgggagtaggggaagttgtgaaaggggagtttttaggtttaatttgttatattttttatttttaatatattggtttttggatgtttatttatttttagtttgtttttggttaattttttgttttatatattggttattttaggttttttattttgttgtttttgcgggagggaaatttagagaagtttttttttattatgttttttattttgagggtatttattcgtagtaagttgaggattatagtgtacgtgaggcggaattgggattgtagttgggacggttttttttggagttaggttatagaagttattgagattagggtgggatttattgaattttagttagttttttggattgggtttattttcgttagattcggttttagttttgtaattatggagttttggataaattatttgtttattttttttgtaatataagggagtaaattgaaataaatggatttaaaggttttatttagttttatatttatatgggagaaaattggaagagatgggttttaattttatttttggatttatttatttttattttagttttttttaggtaaaataaaaaagtcggaggaagttgggcgttgtggtttatatttataattttagtattttgggaagttgaggtagatagattgtttgagtttagaagtttaagattaatttgtgtaatatagtaaaattttatttttataaagtataaaaaaaaaaaaaaaattagttaggtttgtgtggtatgtgtttggaattttatttatttgggaggttgaggtgggaggattttttgagtttggaaggtagaggttgcggtgattcgagattgtgttattgtattttagtttaggtaatagagtaagattttgtttttaaaaaaaaaaggaagaagaaaaagaagagaggagaatcgaagatagaatttagtaaggttttggagttggggttttgtcgagtatgttggttcgtttattattattatgcggtgtaggtttgttatttcgggtattcggtttttgtagagtaggataacggtgtttgtggggtttaggttttttcgttttgttcggtttgttatttgtatatattttttagggagtaggtttcggaaggtggagttatcgtgtttgcgtatggagttaaatattattgtacgagtaggtatgtttatttttatggtaaaggtttttgtggtaaataagatttgggatagaggagaatagaaaggattagtaaaggttttatatatatatatttttagttttggttaagtttattttattttgtaggtataaggtattattttagttgttatttatgggattttattgaattttttaggtaaatttatagggtaggtattattgttttttttattttatttatgtagttatttatttttattttttaatttttatttttatattttatttttatttttgattgtaattattttaatgtatttaataaatatttttttatataaatatgattttatagaatatgtttttttttgtgagtttgtagtttataatttatataaaaagtggttatatatttgatttttttttgtttttttttttttatttagtgttttaatatttgtttatgtttttgtggttatatttaatttattgtttttaattgttgtagaatattttatgggtgtattttttatattaatttttttttttttttagtgaagggtattttggtattattaatattatgttattataaataaaggatgggtgtatatgtttttttatagattagggtgagaatttttttgtgatatatatttaggaatgaaatataagtttagagtatgatatagtttttgtttgtttttttgtttgtttttgttttgagatggagtttttttttgttgtttaggttggagtgtagcggtgttattttggtttattgtaatttttgttttttgggtttaagtaatttttttgttttagttttttaagtagttgggattataggtatttgttattatgtttagttaatttttgtatttttagtagagatagggttttattatgttggttaggatggtttcgattttttgattttgtgatttatttattttagttttttaaagtgttgggattataggtgtgagttattatgttcggttaatatagttattttgtttaaatagtgttagcgtgtattttaaattggttaggtatttcgtaaaggatttttagaattttataattttttatatttttggtaatattcggtatgaattagttttttaaattttattagtttaatagttgtaaagtcgtattttgtgagtattttaatttgtatatttttgattattaataatttttcgaatgtttgttagttttttgggttttttttttgagatttacgtatttatattttatgtatttttattttaagatgggaaatttaaagtttaggaaggttaaataattggtttaggatgatattgtgaatatatggtgtatttgggatttaaatttaggtagtttgaatttagagtttagatttttaattatagtattggtttgtttaaatttttgtttttttgttttttggatagtttttaagtgggtaataagtattttgaggagtttttttttattattatatgtattttgattaggttacggttgaagagtatttttacgatttttttgaggatgggtaggatgtcgttatggtgtatatttaggtcgcgatttaggagttttgatatgtgtaggatttttggtgggaggaggtttatggttagggatggagtttcggaatattttatttttattagtttgttaaatgtgtgtatgtacgtatatagacgtatatagacgtatttggggtagttggcggttagagttacggaggcgagtaaggtagcgttgtaggaagaggtggatttcgttttttttcgaattggtggtgaggttaagggaggtgaggtttgaggtttgtttattatagcggtttcgggagaaggtgaatattattacgggtaattgggtacgtgtgcggagggaggttaggagggataggtatatttcgcggttttggagaaggaaggggaaggggaaggagtagaggttgagtttttgaattaatgagaggtgagttagtgttaattggggtagtgtttaaagtttaagttaaaatttttgggggataaggggaaaaaaaagataggaggaaaaataggtgttggtaggtataaaatttttttagtttttatttgtgtagggtttttttgatgtgtgggttgtttggttttaaaggtttgggcgtgtttgtttatttttttttttttggtttttatagttgtatagtatttggggtatagggaggggtagttataatgtttagttgggggtttagttttaatttttttttttatttcgaggtttatttttttgtatggaaggtttttcgggagtttagtaataaaaagagttttttttgggttttggagttgttttttgtgaaaagatagtgttttaggggtacggggcgggttatagtgttaattatatagatttgacgacgttttagtcgtttgaagaaaggagagggaagtaggttaggggtgggaacgtgggaaggaattcgtatttttatttttttttttatttttttaattttatttagttttttttgagatttagaatggaaggttattttttaatattttattttattttaatatgtaaagtaatttggatttaaaggggattttatagttattaggtgggatatgttttttagtattatttttaaggtttgatcgttttttttgttgtggtagatttagttttttattcgaattaaggagtattgtagttttttttatttaggtaattcgggatatacgttttatttaatttagttagtaaatttaagggcgttggggacggtggtatttagaaggatgatagaaacgtggttaggtagtatgataagtatttttttttatacgattttacgttgggtatagagagggaagggaggttatatgagggtaggggtcgtttttttgtttataaagaggtataggattttatatgggggtaaagaaagtagtaaggggttttgagtgtgtggaataagggagacgtttaattggttttaaaggagaggattgtcgggttttggggagtttatggtttttatttcgatatcgttgatatagtgaattttattaaagatgatttattttaggtttcgaataatatttgagttattgtatagtatggagttggggagaagaggttaaggattgattttttagtggttcgtttttattttttttttagatagtatattttttataacggttatatttttttagttaaaatttttttgtattgagtgtttattttttatcgaaggatttttgtggttatgatgaggtaggaggttttcggatgtagttgtatattttcggtgagtagttttatattttcgaatgtgtttcggaagtttcggaatttttggttgtttagggttttgatgggcgaagtgtagatggtgttgggaagagagtatgaagttagttagttttttcgtagatttatggttcgtatttttttttttatatggagttttcgtggaagtatgttttagaagtttaggtgttttttttttttatttaaattgtttttatatttttttgtatgatataattttagaaaaattttgtttttaatttttttttaaattaatttaggttatttttttaaattttttttttattatgtttttttatttttttttgggtttttgttttagttttagttttgaattttttatttaaaggatgagttagagaggtgggggaagagatgagatttttaaaggatgtaggagaaaatggggttggttggtgaagggggaggttggtaaaggaatttatatcgtgttatgtgtttttgggttagggtaatggtatatttagttataattgttttttttgtagatgtgtgagttgcgataaagatagagttatgtcgttttaagtgtaggatggtttgtttttgaaatatatttggtttaaatgtttattatgggagagagaaatagataggagttgaagaaaggagcggggttttgttgttttttgtttatggagtacgtagggcgggcggatgaaggtcggagttagtcgaggttgggattgagtattaagattggtttgggatggatttgatttttggttaatagaggagataaggggtcggttgggagtgtgatttagaaagaggtagaggagcgtgtgaagatggggttaaagtatttggaaggttggttggggaatgaggcgatagaaattattaataggggaggtggcgtttatagggatggtttattgtttttgagatggaggttttggggtttttggggtggatatagttgtggacgttttttggaagagttaggggtagtagtgataaagatataattagagggtttttaattagtattttttttaaaagatgttttttttttttttttagatttattttagttagtttatattttggtggtaaggtttttttttgtttttattatatagaattattaatttttaatattaggttttttaagttgtttgttcgggttaggggagtattgtagggagaggttgaaatagtgttttttttgggattttttggttgttttattgttttatttttattttcgttatttttatttaaatttagaggttttaatagatagttaaggtttagtagtttaggagttggagttggataatttgaggagtaagttaataaggttaattttgttatgtttatttttgttttttaggagaaggatatgattttttttatattttatttaaaaattaaaattaattttttggtgtaaagtttatgttttttttgaaattaggtggaatagtaagaagatttgtaggatagggatatggaattaggttattgtatattggtgaataaattgtgtatattatataaatttaaaagatattatttataggatagatgttgtagatagggatgtttgttatgatatttttttaatagatgatagtaaaggttgttgtagaaattttttagtagatgatagtaaaggttgttatggatagaatatttttttttaatttttttaaaaatatgggagggttagtagtagtttagtgatagtttgggttttttttttttaaggtttagatttagagttttattttattttttttaaagtttattttttttttagttttttttcgtgtgtttagatttgttatggtgggtttatttattttttttgggaagagataggatagatagggatttatgggatgagggtaatacgagataggtggggaatttttttttggagattaaagatatttttttttattattttatttttataagagttatttggttagaagggatatcgagttggatttttttataaggattgggaggttggttttggaggtcggcgaagagataaggaggttgtagtcgagagatttgtgttttttagtaagatttaaggtaagagattagagttttaatgaggttgagtttgtttttgattatttttttttttttttaattgttttttatgatttttgattttttatttttttgtaatttagtatttggtttgtggttgggtgtttttgggtttgtaggtcggatgggattggggtttttaggatagttaaaagagattagggattcgtttttttttgttattttttggagagaaaaatagtaatttttgggttttttttttttttttgttttagttttttttaggaatttattattttagtttaagtttttttagattttttatcgggttgagtgttttatattatgtagaggtagttaggttggggatgatagaaataattgttttgttttttgttgtagatttggggtataaggagggaggttatggggaagttgaaataagggtaagatgagaggtattaggtaaggaaagaggataaaatgtagataaaagagatgatgggatttgtgtttagattagaaatggtagatgtgttaaatagattaggataattaggtttggttaaaaattatttgttattgaattatttggggtagattttggattttagaaatatggaggttggatttaggaatgtgtatttttaaaaagttttttggttaattatgaagtatattgaaattggagatttattgattttagaaaaaggggttttagatttaaggatgaaaggttggaggtttaaagtttattattttagttattaagtgttttggtgtttggatatagaagggagttttacggagaaatgttatatttgaaagagtagtttttaaagtaaaaatatttttagttttttttgttttgtttttatacgtattgtaggtatattgggttgtaatttgtttagtatttttttaggttgggatggataggagtataggtatagatgaataaggttaagttagattttattgtgaggagggtgaaggaggtttggatttaatgcgggttaaaggttagggttaaaagttatttacgttattttttggagttttaggtaagtttagtagtttttagtgtttcgtgtattcgagttttacggttcgaaggggtaggtttaggggatttggagggggtagtattacggggaaaggttaaaagttaggggttaaagtttattttatatcggttatttcgttttatttttttttttttttttttattaagtcgttttgtttttattattttggagttatagtagttgtttggtagttcggaagtgcggtaagtagtcgttgcgaagtaagtttcgtttcggaacgggcggaagtagaggtaattttcggtatagtttcgtcgagagcgtgaattatcgttgcggaggggtagatttggatcggtggaaggtcgggcggaagtgcgcgtttggggtcgttttggttatcgcgtttttcgtttttcgttacgttatcgttgtgagttcgttattagcggttagcgcgggcgcggtcggagatcgtggggttttcggttgtcgttttttcgggtaaggttttttgttttttatttttcggtttttttttttatagtcgtttttttgttttttttttttgcgttgttttgcgggcgttacgttggttttatcgttttttttgtcgtttaaatttcgcggttgtttttattttagcgagggtaggggggtcgggtgttatcgttttttcgacggagtggatatttgtttttttttgaattatatggtatttaaaggtgttggtgtttgtgatttttggagataggagggaatgttggatgatttcgattagcgggagtttggatagtagtttggtttaagtaaggggtagggaaagttaaagataagagtaggtagatttgaaggggtggggttgggtatagtgtggacggcgtgtgaatttcgggtggtaatagtggagaaagatgttttgggttttgtttttgaattaggagttattatgttggtgatatttttcggattgagcgaggaagaggaggttttgtagaagaaatttaataagtttaagaaaaaggtgagggattgtgtgtggatatggtttaattttttatagattttgtattttgagaagatatggggtgagtgtgagcgaatggggaagtttttttggtttatatttagagatatattattttatagtgtagtttcgagaggtgggtttttttaagttttggtgtggattttttgttttttttatgtaatttgttatggattgttttttttttttatggtttttagtatcgtttaagagttgatgatttttaagtttgttttttttagttttatttagtgttatattgaaaaattttagatatttagtgttgaagttattatttttttatttttgattttttaaataagattgattatattaattttgttatatgtttggatttaaaattttgatttttttattatttgtatagttaaatttttgttaagttttattgtttttttttttgaagtaattttttttgtttattttttattgtgtattttttcgagtagggttttattgatatttatgtgggttattgtaatggttttttaataaattttttagtttttttttttgaatagatttttttatttttgtttaaatgatttattgaaaatataaaattttgttttttttgttttttaaaaattataaatggttttatattgtttataaaaaagttttaaaattttagtttggtagttttgtttagtaaagtagaattatttattatttttaaaagatgtatttttaaagtttttttatttttgtatttttgttattttgttttttttttttaaaatattttttttttttttgtgttgtgtagagatacgggagagggtttagtttaatagttattaaatattagaaaattttattagtttttagttatgaataatttgtattttttataattgtattgttaatttaatgtattttattttttagattgtaagttttttgagggtaggaataatgtattagttttttggatatttttgttacgaagttatggttgggttttatttaatatgtaggaaatagatggatgaagtttttaggaaaggtatataaatttatatttatttgtagtttatattttaggattttagtttatgattgagttatttgtttttaattttaaaaatgtaatattttggaaaatttttgggtttcgtggtttggttagattaggaatttttagtattatatatgatttaggggattagaggtaagaggtagagtatattagtgtattattttgagggtattaagaaagatggtttttggagtgatgtgtttaggggttttaggagaggaatcggttaggggttggtttttatttatttttttttttttatttttgtttttagaaaaaggtattgttggttttgaagaagtaaagtagtagtagtataattagttaaggtggtgttaaacgttgtgagtgataggggaaatggggatggattggaagtgggtagtatggagttgatttttattatggtttggttaatataatgttttttttttttgtttttttagtattattagagtagtttgttatggatatagttatagtaatagagtaggtaaagtagttggtgaagttaggagttattagtgttattaaggttgagattaagaatttaggttttaagcgttttcgaatttttgaggggaagttaaaggtgagtataagtagaaagattgtttaaagggtatttttttaagttggaatgtagatgggtttggggaaaaatatgtatatttaagtattggtaaattgttgtattattttgagttttattttttatgtataaaatgaaaaaattagacgatttttgaattttttattttataaattttgtggttttaatttattttggattggagtttttggaatatgttgttttaagggatggaaagggttgaaaatgttattaggtttaagagaggtttaaataaattgaatatataatatatcgagttatttataaaaaatattagttgggcgtggtggtttatgtttgtaattttagtattttgggaggttgaggtgggtagattatttgagattaggagtttaagattaatttggttaatatggtaaaatttcgtttttattaaaaatataaaaattagtagggtgtgaggtcgggtacggtggtttatatttgtaattttagtattttgggaggtcgaggtaggcggattacgaggttaggagatcgagattattttggttaataaggtgaaattttatttttattaaaaatataaaaattagtcgggcgtggtggcgggcgtttgtagttttagttatttgggaggttgaggtaggagaattgtttgaatttaggaggcggagtttgtagtgagtcgagattgtgttattgtattttagtttgggtgatagcgagatttcgttttaaaaaaaaaaaaaattagtagaatgtggtggtgtatatttatagttttagttattgaggaggttgaggttagagaattatttgaatttaggaggtagaggttgtagtgagtggagattatattattgtattttagtttggacgatagagtaagattttgttttaaaaataaaataaaataagttataatggtaggtgcggtaatggtttatttttggttaattttagtattttaggaggtcgaggtaggaggattgtttgagtttaggagtttgagattagttttggtaatatagtgaaattttatttttataaaaaaaaaaaaaaatatagaaattagttaagtatggtagagtatatttttagttttagttattagggaggttgaggtaggaggattgtttgagtatgggaggttaaggttgtagtaagttacgattgttttattgtattttagtttggataatagagtaggatcgtgttttaaaaaaaaaaaaaaaaaaataagtaaaattacgttaaataagaaatgtatgtagaattaaaagggaagaaaagattagaggaaatttagaagagggtgagggaagaggaatatttttggtttatggttgggtaattttttgttttatattgaggtaggttttttattattttaggatttcgagaagggattagtttttattttttagtcgttttagaggagtatatttgttgatgatgatttgtaagaggtaaaggtttttaatttttgtttttgaggggttggggatggaggaatatgagagataaatatattttggattatatgttagtaattggaaattattttaattgtttttggttttttttatagttatttagacgtttttagaggaaatttttgtatgagaggttagagagtagagataaggttgggtttatttggtggagttgattgtttgagtttttgggaggtttgggttgtaggagttgggttatagagggaatattgagtttttatagggtttgaggggagaaggtaaaatttttttttgatttttagtttgtatttttttagttttgtgttttttagtgatcgatttcgagaattaggattagatggagaagaggtagagggtttaggggttggtgatggtttttttcgaagttttgattggggttatgaagaacgtagtggtgtttattttttagtttttttttttcgaagtcgtagtcgggatcgtagttatgagaggaatcgggatagagatcgagatcgggagcgggatcgagatcgggatcgagatagagatagagagcgggatagggatcgggatcgggatcgagatcgagatcgggaacgggatagggatcgggagcgggatcgagatcgagatcgagagggtttttttcgtagtgagtgattttggttggaggttaaggtgattttaattgaggtttatgtgggttttattaagtgaaatgtggtatgggttatgttttgtgattatgatttgtgtttttaaagggtcggatttattttttgaacggcgagtttttaggaaagggaatattttttatgtatatggagaagatatgatatttattttttttcgtggggttttttttttttttggaaatattattgatttttttatggatttatttagaaagtaaggatgataatagggtatgatgagaagttttgggagaattttggggtgtgagatttgagggaagaagttgttttttttgtagtcgtttattattattgggtttggttgggtttagaagagttttttggttttttattgatcgtgtttttttttattttagttgtgttttcgttatttatgaaaagatggagttagtagattaggtcgttgttgaggttggaattttttaaatttgttttttttatcgtttttgttgtttttatgtgttttttttaaaatattagatgttaggaagaagttggttttttttgataaagaaagtttttttttatttatatagaaaaatttatatttttagattttttatttagtttttttttaggatagtaatttttggaataatttttttggtttatttgtaatgtttttttttttattttttgtttttttttttttgttttagtttaacgggatttaggtggagtttgtatagtttaaagttaatatagttcgaaaatagtttatgttggatgtcgttattggtaagtttgtttggggttttttcggtaagaatgggatttttttttttttatttttttttttataggttattttttttggtttttttatatatttttgggttttttagagatgatcgaggttagagtgtgtgcggaggttatgggaatgggaaggaaaattttagattttttgttagttagaggtaaagaaaggagagaaaaggattgaaaatagtttttaaagtagtgattggaatagggaagaaagtgggagttggagtgagattggtgaggaagatgagtgttttatggggtttgtttattttgagatggagtagagtgagttttataagtattcgaaattagggatttggaatttaggtgtgaggtaaggaaggaaaatatagattaagttatttatattatagggtggttgttaaataataggattattagggagattttgattttagagaaaaaaaaacgatttaggatttagtttgaggagtattttgggattatgttaggaaataggattgtttattttatattttatatgtttttagttgttttgatatgttaggttaacgttgagtttaacgttagtaaaggagataggaggaggggtcggagggttgggagtagtatcgtaggggtttgggttattgaagtaaaaggatatatattttgagaaagagggagtagttagtagtgttgaggtatagagattataggatgggagtgggtgagagagattttttgtagtttaagggtggtggggatggaattattggatggggtgaagagagtaatatgtttggtggagggaggaaagaggaaggggaagaaatagttagaggtttaagagagaatggtgagggttaaagttatattttgaatgagttttggtggagttagtagtattttttagtgtgaataatttattttttttgaaagtagatttttttgggaaaggagtgagtagaaagaagggtttagttatagtggttttttaggtaaaagaaaggaattagaattgattagtatgttaaaaaagggttatagaggttttttagtttttagtttttgatatattgattgtaagtagtgggttaatattatttacgtgttttaataatgatatttgggatttttttaagaataaaatatttattaaaatgtttatttatattttttttggttatgggttggtataaaggagttaaggaagataggttattttggttattagagggtagcgtggaaattgggtttttaggggttagtggttaggagtgaggtggttaggagttagttttagggtttgttttatgattttttttagattttaattgttttttttttttttttttagttgtttagaatagttttaagggttgttatcgggataagaggatttagattgtttatagtgatgacgtttataaggaaaattttgtggatggtttttagggaatagagttggattttttgtgttttatatgttttaatgttggttttagtaaaatattgaggtggaagtttatatattttttttagtttttggttttttagtatttgggattggggttaagtttttaaaaacggttgttaggtttgattttagtgtaacgatatggttagtgtttgttttttatttttttgttttaaaaggatttggaatataggtgttgtcgtagttgttttaatttaattttacgtttttgtttagtaggaaattttttatagaaaatttaaatttttattttggagttttttttttagttagggtagtatttgaaagaggttgatgtgaaagtttcgggcgtgagtaggtatttgtttttgtcgtttttggtttttgtagatatttattattttttagttgattatattaatttgtagaggtagtggggtgttatggattatttagtagaatttttaattttggaagtatggttgtttttgtttgtgttttagttgatttaaaggaattagattagggatttagtttagtttcgtttttgatatacgtaggtaagatatgcggttttaaggtgaggtaggttttgtttatttcgaattattagttatatgtattgagtttttttgttttggggtttatgttgattatttggtatttttttagataggaaagggaggatttatttgaatgaaacgattttttttgtgaattattaaggggtcgttagaattatttgtaaggagaggagaagttgtagagaaaaggattgttgggttttgggtatttgtagtataattaaagagtatttttttatttttgtaagtattggggttagtatagggatttatttttttagtataaaggaatcgaggggtgattatttttgagatgtttttgattttgttatagtttggggtatattgagtattttttttatagttgtttttttgtaggggaggtgggaagtatggagaagtaatgaatagaagtggtttaggaaggattggggtttagagtgtttttttaggatgttcgttttttattttatttttatttttgatgtagattttttttcgagttagtttttttttttttttagatataaatagagttttgatattttgtgtagggagtagttttttttttggacgaatagattgcgttattttagttgtttttattattgttatttttttattgtttttgttatttagtagatgttttttaagtttttttagagttaggttttgggttaggtattatttttttttattgtattttttttttatgttttatttgttttttgggattttatttttatttttttgttaagtatgttttattttgttgttggtaagtggtagttggaggaagttttaaagttcgagttgttttttcggtgtaggggagataaatgggtttataaaggataaggagaatagtaaattaggtttgttttttattttagttttttagttttttttagtttttttttagggatttggacgtttttatttgatagtttggttatattttagtttatttttgagtttgattagggtaacgttatagttataaaatttaggaatttttgtttttttttttttattaatgttgtagttggggtgaaataggattatttttatttttaggtttcgtttttttttttttgaagtaggagagtaggtattatttttttgtgggtagttttttgtttttggtttcgtgttatttttaattttacgtttttttttatttttgattggtttggggtgtaaggaatggggttgtattgaggatgggtggagtgtaggatttgtagaaagtgggaggtgttgtttggagagtataggtgtagtttaggatttttagttgtatttttatttacgttgattttgattgagtgttttttgttatttatagtgaaataatgtgttgttgttagtataaagtatttagatattatagtttttatatagttttcgtgtttttttgaagggcgttggggatataatagtagagagggaaagtttaatttttataaattattattttttatggttatttttttttttttttatttttattttattttgattttattttttttaagtttttattattgggattttgtgtttataatgattgagattttggtttgttatggttgtttgtggtaatcggtattttttttgtgtttttaaattatgttatagagatttagagattggtttttatttggtagagaaggagaatgtgttgaaaattcggaatattttatttttaaatggtagtagttttttgggtaggagtttatggggagtaaaggtttaaaaggagaaagggaaagattacgggtatttgttttttcgtgttaggagaaaattgttatggtggattgaaaagggaaagaatttgggattaagttgttagaggtttggttgtttttaagtttatttttgttgttaatttgttgttttttgattttttttggtttttgtttttatatgtgttaaatgtaggattatagaaagatttttgaagtgtttagagttttgtgattttaaggttaagtgaatagtgttaggaaataagaatagtgatattgaggtagagaaggaggaatgaagaaggttttttaggtaattagagttttaggtgtagaggaagaatgaattattttaggggaatttgaggagagttgtgttttttatttttttgtatttttttatcgattatttggtagaaaatattttttaggttttttatatttttgattttgaatatatgttgtttattgttttttttggaagttaaagtattgatgtttatttggtttattaaaggttcgattttaaatatatagatatttgagggataaaaaggaaggatgagggtttaagttttgaggaagtggggtgttgggttttaggtaggttatttatttagataatttttttttgggtttttgcgatttttgttaatgtatagtaagtttcggattttattaatgatagtaattgggttttcgtttatgttgtgtaattttgtagaagagataggattatgagggtaggagataaggaagataaattggttaaaggtagggatatacgtggtagggtgagtaagttgaggaagggttagagatagttgattatagggtttaggaagaattttttatgaagggttataggagagatgaatagttagttatgagttatatttagggttttaattatgggtatagtgttataagtggatttaagggttatatgttggtttgagaaggtggggaggttgggataggagagaggttttttttgattattagttatgaggatgatgatatggcgggtgcggttttagtttttaggagggacgttatttggttagtttattatgttgtatattgtttggagggtttttttggtgttagtttttgattttaatttgtggtttgtggagagggaagagattattattttatttggttttttaagttattttttaattttagagattaatttgtaattgaaattttatattttttaattttttaagttaattattattatacggatttttttttgattataaagtggtttttttagtttttaataggtttttattaatttttattgtttaacgattttgttgtttaatttttgattataaagtggttttttttgtcgtttttaaggtagttttatgattttttttattttgaattttttgattttaaagtgaattttttattattttttaatttttgatttttataattgattttattgagttgtttcgtgatttagtttgtattattgttgtttgttttagatattttgatttaaattttggggtatgtggtatatgttattagattatattttggttttatattataatttgttatttgtgggtgaggagaataaggcgttatggtattgaaaatagaatattgtgattgggagattttagcgattttgttgggatagggaggtttttagtaagaggtttaagggttgaggtttatggaggaattattagttaagaaattgttttaagtaaaagggaaggaggatagaataggatttggagatttttttggggttttgttgtttagaggggttggaatgattagggagttagttttggaagattagcgagattttattttttcgagtttagggataggaggattttatttttttaattaagttgattagatattttttggtttttgtgaagttgttggttttaatgttgtttgatttatttagtattaggtagatgtttatggagtttgaagggtttaggacgatttttcgtttttgttgtttttttgggtgttaggagagtggtttaggttttagtattaatagttttgttttttttttatttttttttagttttttgttttgttttttttttttgtttttaaatttgggtcgtgtttatttttagtatcgattttttttatggtttttgttagggaagataggaaagtttcggttattttttgaggggtgtcgtatatgaaggagtttgggagagttagaaatgaggttaaatgtttgggagtgttagggatatagtgattaaagagacgggggattatgggtttttagggtataaaaggtttagaagtgagatagttgtatagggaggtttaaataaagtgaggaaagagtagggttgaggtggggagagaagatagtaggatggaagattaggatttgatttgggggtataggttaaaggttattttggtaggaaggtttcgtttcgttttaagagttatttttttgatacgttcgtcgttgggagttacgtagggtaagttttcggttgtagtggtaggtgacgttgtttttaaggcggtattggttgtttattttttttgtgttaatggggatgttcgggttggagtagtatttcgttgtagaggtatgagatatcgaggtaagtattgaagtttgaggtttcgtgagtaaggtagagagtaagagttatagtgttcggagtcgagtgtttatttttcgggttgggcgtcgttagggagatagtaatgtagggggaggggatgttttttattttcgttgttatagatcgttgtttgtttattttatcggttatttatttggtaggtgcgattggtagagtttcggagagtgtaatcgttatagtagtggaaagagattttattatttatattgtagtagggagatcggggttagtatttttcgttttcgaagtcgtgtggttttggatagtggattgttttgagaaggggggataagtagaagttattaagagggaaaggttgttttaggtgtattttttttggtttcggagattatgttattgagaaatagcgtatttttagtttcgtagaagtagtattttatttattttttaatttatatggatttttattgtttttttttttttatttttgagtgtttttttgatttttagggttgtttggaagtttagggtaaatgtttagtaagggttaatttcgtttttttttgtttttttttcgtttgttattttaaaattgtttttattttcggttagtttattttgttattttgtttagttttattttagttttgattttgttgtcgtttgttttgtttttgttttaggttattgtttatatttattgtttttaaatttttgtattttgtttttttgatagttttttggttttgagtttttagggtgttttaggatttcgtagatttgtaggtacgtgtttgtatagggtacgggtagaagttagaaggatatacgtattttagtgtttggtttttttggagaagtcggaaggagtcgtttttgatttttattttttttagagagtaggatttttggggttgggttaaagattatggagtggtggttatatttgaagagaaaggttgatgaagtttggttttaaaaggttaaggagggatgttggagatagtaggaagggaaggttattttcgtttatttttagataagaggtttaagataaagggtattaggtagagttgggggttgagattgttttttatggcgttggaaggtaggagagaagttgggtttggggtaggatggtgtgttttggtttgttttgtttgtttgtttggtttagtgtttaagttgaaattttagatttagatttggttatattttttttttttgttttttattagtttttagttttttatataatttgtgttttggtatttgcggttcgtttcgtttgttttatttatattattttttcggaatatttaagcgggagggtttcgttgagttgttagttaaggaaatagaaattgtagaagttttattttttgttgttaaaggtttaggatttttttttttagtatttttttttcggttttagtttttttttagtaagtttaaattatttatttagggattagaaataaggatttagtttatttttttgttgattgtgtgttatggtgtagagtttagttattgtttgtttagtggggtttttgatttgtttttttgtagtttttggagttattttggttttttttttttttaaggttagttttatttggtttttagatagaggtattgagagatgtggaaattattgatttttattaattttataattgggaaattttatgtgaaagtgaaataagtatgagttaagttaattagggaaggaatttggggataggttaaggagcgggaggtggggtagcgaggtagttttgttggtaggagttttgaggattttttagtttgtgtgcgttgtttttggtattttagagattcggatttatttagttaggagagaggatggattatagggtttaagggtggttatttagaggtagaagatggaggggcggtagattttggtagggtagtagagggtttagtggttatggttagaggggtaaaaaatttaggatattttttaggtgttgttttagttagggttgtatgcggaagagattgatgtgaaagtttcgtggcggcgggattttgttacgaggggtttttttgcgggagtttttgttagtagagttaaggtaggggttgtaaagattttagtttattagatttatttggagaaaaggagagaattggttgggaggttgttatagttttaattgtaagttttaatttttttagattttttaaaggttttttttatttttttaataaggttgagattttgtaatttttgggttttgtaagtttttatttttttatttgaaaaaatttgaattttcgtttaaggaaaattgtttttttagatttttttgttagtaaagggtgataggagatagtgttatttagggtagtggattggtgttttggtatgtatgttggttatagagatataggtggttttttttttgggaatttaggtatggtgagggatttatttttgtagggatttttatttttttgggttttattgtataggaattggtttgttattatttttttgatatttgttaagttggggaatatggtttttttttgggagataatttcggtatagtttgtttattgtagtaggggtggaattagagagaagggtagaataagtagattcgggtgggtgtagtggtttacgtttgtaattttagtattttgggaggttgaggtaggtagattatttgaggttaggagtttaagattattttggttaatatggcgaaatttcgtttttattaaaaatataaaaattagttggtgtggtggtgggtatttgtaattttagttattcgggaggttgaagtaggagaatcgtttgaatttaggaggtagaagttgtagtgagttgaggtcgtgttattgtattttagtttgggagatagagtaagattttattttaataataataaaaaaagaataagtagatttagggatatttagtaggtttgtgaggtttgggaggaggggtgattcgcgttagagagagaaagtagttagatttggagaaggaagagagatattttgggagttgttatagggggattttagtatttttaatttgagatttttatttttatttttattttaaggttaatgtttagtttgtttttatttaaggcgataaaatgagtaggaatattttgtttgtttagtagtttattttttatagttaagagaaggggatgttggtgttggtttttttatttagaatttaggtttttggtttggggattgtagtttagtttttgttattatttttaaatttcggttttagtttttaagtattataagttttagtatttattatggtttttataggtgttgttttgaggttttcgtagagttagattggtttttatcgtgtagggaaggtagatgggtttggggagaagagtaagggttatattagtttgtttttagtattttttttagggatttttagagtatttttttttgtagggtatttttttattttagattttaggtatttggtatgggtggatatttttattttttgggttagttttagtagagttatgttattattatagaattttaggattttttggttttttttggtaaagatattaaattttggggagattatcgtttttttaataaggaattttttgttttattgggatttggggttttttggaaatgatatattagattaggttagattagggtttttgtaggggttagaggttgggtgaggtggtaggatttgtggttttaggattaggaggttggtgtattttttgttttatttatattgattttttatagggagtggtcgttgttatcgcggaagtaatgagttgttgttaggatttattggtcggagatgagggtttttcggtaggttttttggtttttgggttgtaggggaataggtgatttttagagattgtagtatgtttggtttatggtcgtttttatttttggaatttaagttttgttttttttttttggtattttaatagtgatatgttagggtgtttttttttggttagaggcgtttgttgatatgttttttatttcgtagatggtgtttgtgagtttggagatatttgtgggtgtgaggattagatggggaaggaggtaagtgaggggtattgtgtttaggtttttaaaacgggtttttggcgggttttttattattttttttatattaaggagggtaaagtttatttatttagtatatgtttaaagatttggtgtagagtttttgtgttttgtagaatgaaggtatgttttttattattttttttggattttagtttatttagttttttttagtttatatttagtttgtttatttcgatggtatagatgtttggtggggaagagggaaattattagatttttgtggttttggggttattttatgagataggaggttgttatttgaaatttattgtgtttaattaagatttatatgagttggatttttgcgttttttttattgttatttgtttgtttttattttttgttattttttgttttttatttttttgtagtatatagtttttttgaagttttttaaatttataggtatggttatattttaggttttttgtttagttgtgtttttgtttagtttatttttttttttaagatttttatatggtttattttcgtatttttttaagttttggtttaaatgttatttttttagtgaggttttttttggtttttttgtttaaaattgtaatgttttagataaatttttatttttattttgggaggtaaggtgggaggattttttgaagttagaagtttgagattagtttgggtaatatggtaatattttttagtttgtgttatttattatttgttgggttttatggtttttttattttgtttattttttgtaatggtggaattgtgttttttagaaagatgtgtttgagttttaatttttagtatttgtgattttatttggaaaaagggtttttgtagatgtaattaagttaagattaagttatattagattagggtgagttttaatttaatgattgaggtttttataagaagaggtaagttagagttaggcgtggtggtttatatttgtaattattaggaggcggtggttgtggtgagttaagatcgcgttattgtattttagtttgggtaataagagtaaaatttcgttttaaaaaaaaaaaaagaagaggtgagtcgggtacggtggtttatatttgtaattttagtattttgggaggttgaggcgggtagattacgaggttaggaatttaagattagtttgattaatatggtgaaattttgtttttattaaaaatataaaaattagttagatatgttggtatatatttgtaattttagttatttaggaggttgaggtaggagaatcgtttgaatcgggaggcggatgttgtagtgagtcgagattgtattattgtattttagtttgggtaatagagtaagattttattttaaaaaaaaaaaaaaaaaaaaaaaaaaaaaaaagtgaattggttgggtatggtggtgatttatgtttgtaatttcggtagtttttttgaggcgaaggtaggtagatcgttttgaggttaggagtttaagattagtttagttaatatggcgagattatgtttttattaaaaatataaaaatttgtcgggtatggtggtatatgtttgtaattttagttttttgggagattgaggtacgagaattatttgaatttaggaggtagaggttatagtgagtcgggatttcgttattgtattgtagtttgggtttttgggtgatagagcgagattttgttttaaataaatgaatagaaaaagaagaaaggaatttggatataaagatataggtagtgggttttttatttatataagagaatagtatgtaatgatatagaggtatatatagaaaagaaggcgagttgaagatagaggtagagaatgggtttatgttgtcgtaagttaaggttggagttgtcggtagtcggaaaaggtaggaaagaattttttttaagagttttttgaggaagtacggttttgttaatattttgattttagatttttaatttttagaattgtaagaaaaagaaattttgtgttttaagttatttaggtttgtggtagtttggtaagtatttttaaatgattgaatgaatagaaagaatttagaatataatatggaaattaaattttagatttggtttttttttgtaaaaggtagtatttgggagaagggtttaaagttacgtttttttattggaggttttggatttatataataggtcgcgtttgtttttcgattgtggtgttagttagaattgtttttaggtagattatagagtttattttttttttagtttttgtattttttgtggtttatttttgtttttagagagtttcgcgttgtgtgtaaaaagtaaggtgtttaggtggattaagagatttttagttaggaggtaatttggtaatggtttagatagaaatagttatagttggagttagataacgatcgtgttttgtgcgttttttttgattattttcgtttggttttttgtttatttttaataaaatgtttttgtagtatttgattttggtttagtgatgttaaggaggaagggagtgggttttaaattttgttttttttgggttagagttttaaagaggaattagtttattttcgagggttaggtgatgggggagggggtagtgtgaatggaaaggagaggagttaaggggaagatgaaaggttggggtttaaaattagttgttttttttgtttgagtatttttttttttgaaattattttttgattaaaggttagtgtaatttgtgtttagtttgaatttgaggaattttttttttagaagttgtaattgttaaagttttagttagttagttgtgttgttgaaagagtaattattagggatattttttagagggaatcgaggttttttttttttggaaagttttttgaaatatgagatgttatgatgatgatgatgatgataacgacgacggtcgtggttatggttaatatatgttgggtatttttttatgttaggtaggtagtgtttgtttgagtatttttttttgttagtttgtgagttgggttttagtattattttttttttgtagatgaagaaattgtttatggttatagtttattgaagatgaaattaaggttttttgtttaaagttgttgattaaaaataataattaaaaaattaaaaattggttaggtatagtggtttacgtttatttgtaattttagtattttgggagattaaggtaggcggattatttgaggttaggggtttgatattagattgttaatatggtgaaattttgtttttattaaaaatgtaaaaatgagtcgggtatggtggtatatatttgtaattttagttattttggaggttgaggtaggagaattatttgaagttaggacgtggaggttgtagtgagttgagatcgagttattgtattttagtttgggtaatacggtaagattttgttttaaaaaaaatttaaaaattaattttaaaaaatttgtgaagacgggttgagtatagtggtttatatttgtaattttattattttgggaagttgagttgaggggattatttgaaattaggaatttgaggttgtagtaagttatgattgtattattgtattttatggtggtatggtggatatcgttattttttggattagtttttgggtcggtatgggtggatatttttttaggaatatattttgagtgttagtgagatattgttttaaaaaaaaaaaaaaaaaaaaagaaggtaaggttgagattatgggtagtagtttgattttaggttttttaatatgagttgtttttgtatagaataacgtagaaataaaattatgtggttttggattatagttaagatgttgagatttttggttgaagatttcgtgatttttgtaggagtagaataaatgtggtggtagtggtaggggtttatttagatagttattttttttttggttgatgtttaggatttttttgatatggttaatagttgttttgggagagttatttatattggatttttttagaataaagagaataaagaatttttttaggtaatattaggatttttttaggttttggaagagtaggaaagtatttagtttgggaattttaatatttatattgtttgtgagagttttaaaatatatttttaggttgggtatagtggtttatatttgtaattttagtattttgggagatcgaagaaggcggattgtttgagtttaggagttttagattagtttgggtaatatggtgaaattttgtttttattaaaattataaaaaattagttaggtgtggtcgggtatggtggtttatgtttgtaattttagtattttgggaggttaaggtaggtggattatttgaggttgggagtttgagattagtttgattaatatggagaaatcgtatttttattaaatatataaaattagtcgggtgtggtggtatatgtttgtaattttagttatttaggaggtaggagaatcgtttgaatttgggaggcggaggttgcggtgagttaaaatcgcgttattgtattttagtttgggtaataagagtgaaattttattttaaaaaataaaaataaaaattagttaggtatggtgatatatgtttgtagttttagttattttggaggttgaggtacgagaattgttttagtttgggaggtagaggttgtagtgagtcgagttcgtattattgtagtttagtttgggtaatagagtgagattttgttttaaaaaaataaatatatatatatatatatatatatatgtatgtatatatatatatatatatatatatatatatatatatatatttttattgaaatgttttatattttaggtattaggttaggtgttttttatattttaatttatttaatttttatgaaattttaggtagagtgggtatttttattttatatattaagttttggaggaattgtgtaatttggataatagtaagaggtaaatgataaggttagatttattatagattgttttttgtattcgtgtttttcgatatttttgtttaagagttacgtttttttatttatttttaagttattttttagatggtaataagagttaatatagagtatttttatataggtaatttaaatagttttttataaaaattgtgtaaggaaaggaggatagttattatgattattattgttgttattgtggttacggttattattattaatattaattttatttatttatttattttattttgagataaggtaggattttggtttgttatttaggttggagtgtagtggtatgattttggtttattgtaatttttgttttttaggtttaagtaatttttttgttttagttttttaagtagttgggattataggcgtttgttattatatttagttaatggttttgtatttttagtagagacggggttttattatgttagttagtttgattttaaatttttaattttaagtgatttattcgttttggttttttaaagtgttgggattataggtataagttattatattggttttattttataaataagaaattgggttaggtgtggtggtttatgtttgtaattttagtattttgggaggttgaggtaggaggattgtttgaagttaggagtttgagattagttgggtaatatagtaaggttttatttttaaaaataaaaataaaattggggtttaaagtggaaggtagagggagaattagaatttagggtttttgattttatattggtgttttttttattattttagatatatttagagattatgatatttattatttgttagaaggatgatggtatgtcggattttttgttaggttatcgtttttatgtcgaggagtcgtatttggttgtttattatgagatagatattgtttaaggttgtataggtgttagttttagttttatttttatgatttggaatatgttaaaaggaaggatttttttagaaattttttatttattatttaggggtagggaattattttatttttttaattattggaaatgtaatttttttttttttttttgagagagtttcgttttgttatttaggttagagtatagtggcgtgattttggttgattgtaatttttatttttttagtttaagtgatttttatgttttagttttttaagtagttgggattataggtgttagttattatgtttagttaattttttgtatttttagtagagatggggttttattatgttggttaagttggttttttgattttaagtgattcgtttattttagttttttaaagtgttgggattataggtatgagttattgtattcggtttggaaatgtaatttatcgattgttttgataaatttagatatttgttatttagatagagatgtggtattattgtttgtttaaattttaaaagtttttttattttagaaatgtttattgtatagggtcgggtaaggtggtttacgtttgtaattttagtattttgggaggttgaggtgggcggattataaagttaggattacgagattagtttgattaatatagtgaaattttattttaattaaaaatataaaaaattagttaggtatggtggtaggtgttcgaaattttagttattcgggaagttgaggtaggagaattgtttgaattttggaggtagaggttgtagtgagttaagatcgtgttattgtatttaagtttgggtgatagtgcgagattttattttaaaaaaaaaaaaaagaagaagaaaaaagaaatgtttattgtataattttaatttaagattatattaaagttttaagatttaaagatgaggtttttaaaattttgagtggttttagttatttgttaagtgttaattaggtattttatatggtgtatgggtggttaatgatatggggagatggtagtgtgtagttatgtaaattagatagtgtggttttggtaattggaaggaattgaagatttgtatagtgtttttggatttgtagtattttagaatgagttatgagttgggggtagttggatttttttattataattttggacgttgaaattattttagattcgtgggatttaggtgttattaagaggttttattttttttttaatttatttagaatttgtttgtaggttttgagagggtttattttttttttttttattattattacgtgatgatattcgtatttttatagttggtattttttaggttgttgattattttagttatatttcgggagttgtcgtttaggatagatatgaggattttgggttttgaggtaaaggtgataatggtaacgtttatattgattttaaagttgaagatttgtgcggggtaagtgagaggtagcgtaaagggttttgaagttaaaggggagatggtaagagagtaaataaagggttttggaggaggtagagaaattggagtgagatcgatagaggtaaggattaggggagatattaggaaatggttgttaggaagaagttaggggttgggcgcggtggtttatgtttgaattttaatattttaggtaggtggattatttgaggttaggagttcgagattagtttgattaatatggtaaaatttatttttattaaaaatataaaaattagtttggtatggtggtaagtatttataattttagttatttaggaggttgaggtagaagaattatttgaatttaggaggtaaagtttgtagtgagttgagatcgtattattgtattttagtttgggtgatagagattttattttaaaaataataataataataataataaaaataaggaatagtagtagttaaggaagaaatttttgttgaatatttttttttttgatagattttttttattttattttgtgaggggtatgatgatttttattttatggataaggaaattgaggtatgttgttttgtttttttttttttattatattatgaggaggaggtggaagtgggatttgaatgtgttatatgatttttaattattgttttaattggtgtgtgttgtcgtttcgtagtgtaatgagttatttaattttgagttttaagagagtatagaaattgttttttttaaaatgtagttgggagggaaaattatttataatgttatatgaagtattgtgaaaagtataattataaaataaagttttggcgaggaatttaaattagtggtttttaaatttttattatatatattttattttattttattttattttatttatttttttgagatagagttttgttttagttgtttaggttggagtgtaatggcgtgattttagtttattgtaatttttatttttcggatttaagcgatttttttgttttatttttttaagtagttgggttataggcgtgcgttattatacgtggttaattttgtatttttagtatagatagggttttattatgttggttaggttggttttaaatttttgattttaagtgatttatttgtttcggttttttaaagtgttgggattataggtattagttattatgtttagtttattatatatattttaaagtttgtataaaatgttgaagttttaaaaggaaattattaaatattaaattattaatttgatttaaattattttataggggtattagtatttttttgttttatttttgtgggttattttattatttttttgtggagattattgttttagatgatgaatttttggaaagtaagattttagtttttttatttttgttgttttttagttttagtatagtgttttaatagtgtttgtggaataaaaattatgattgtataaattgaatttatgatttttatatggtatgagtataatttgagaagattttttggaggaggtgggttgtgagtggggttttgaggaggggaaggagatagagagagatagtgagtataggaaggtttttgttgtaggtagatttttgatttttgattttgtttattatgagggaggcgttttttttgaagatgagaaagttatttttcgatatattttgcgaatagtttaggagtaggtagaggtttagatgattagagcgttggatttggattttacggtttaggttttttggagaaatgtggaaggggaggatttagatttttattttttttttgcgttttcgttaagtaggtttagtttttttgttttttttttttttagtggttgagtttattaaggtttttggtttttaggaaggttgtatttttttttgtttcggtttagatttagtattttgtttaattagaaattttattttaaatatttattttttgttttttgggtgggattggtggttttaagtatgtgggagaaggaagtgtttagggtaggggttacgtttttagggaagttataagagtagggttttgtggggagagttatataggagttagtcggggtagtggtcgggtgtgtcgaggaattttaggagggtagggtagttatttacggcggtagatgggtttcgttttattttagatttcgttgttttggtattttcgtttcgaagatttcgtgagtataagattcgaggagtagcgatagcggattttgtttttatgattaaagcggaagtttgttcgtattgcgtttagtgaaatgtttgggttggggtagtggttagttgcgagtgaataaaggaaggtagaggtgagtagtttttttttattaggttttgtttttttagcggttttagttgttagtagaagttttttagttttaatttagggatgtatttatgtttgttttagagtttttagagatttagggaagaagttagttgatggtttttttatttttttagagaatatttatattttataaattatagtgaggtatttttatatatttattaaaacggttaatattgaaataataggtaattttaagtgttggagaggatgtagagcgattggtattttgttattttgttggtatgtacgtgggtgaaatttttttagtttttattataattaaatatatgttagtttgtgatgtgataattttatatttagattatttatttaagagaagtaagtgtatatatgtattaaaattatatgtaagaatgtttttagagtttttttttttttattttttttttatggtttttttttttttttttttttacggtttttttttgatgtcgagtcgaagttggacggtattgttgttatttcggtttattgtaatttttttgtttgatttttttgttttagtttgtcgagtgtttgcgattgtaggcgcgcgtcgttacgtttgattggttttcgtattttgttagtggagacggggtttcgttgtgttggtcgggttggtttttagtttttaatcgcgagtgatttattagtttcggtttttcgaggtgttgggattgtagacggagtttcgtttatttagtgtttaatgatgtttaggttggagtgtagtggcgtgatttcggttcgttataatttttattttttagtagtttgttttggttttttaaagtgtcgagattgtagtttttgttcggtcgttatttcgtttgggaagtgaggagtgttttcgtttggttatttatcgtttgggatgtgaggagcgtttttgttttgtcgtttatcgtttgagatgtggggagtatttttgttcggtcgtttcgttcgggatgtgaggagcgtcgttgttcggtcgtttcgtttgagaagtgaggagattttttgtttggtaatcgttttatttgagaagtgaggagttttttcgttcggtagtcgttttgtttgagaagtgaggagttttttcgtttagtagttatttggttcgggagggaggtgggggggttagtttttcgttcggttagtcgtttcgttcgggagggaggtgggggggttagtttttagttcggttagtcgtttcgttcgggaagtgaggggcgtttttgttcggtcgtttttattgggaagtgaggagttattttgttcggttagttattttgttcgggagggaggtgggggggttagtttttcgttcggttagtcgtttcgttcgggagggaggtggggggattagtttttcgtttagttagtcgtttcgttcgggagggaggtgggggggttagtttttcgttcggttagtcgttttgttcgggaggtgaggggcgtttttgttcggtcgcgtttattggaaagtgaggagtttttttgttcggttattatttcgtttgggaggtgtgtttaatagtttattgagaaggggttatgatgataatggcggttttgtggaatagaaaggggggaaaggtggggaaaagattgagaaatcggatggttgtcgtgtttgtgtagaaagaggtagatttgggagattttttattttgttttgtattaagaaaaatttttttgttttgggattttgttgatcggtgattttatttttaattttgtgttttttgaaatatgtgttgtatttatttagggttgaatggattaagggcggtgtaagatgtgttttgttaaatagatgtttgaaggtagtatgttttttaagagttattattattttttaattttaagtatttagggatataaatattgcggaaggtcgtagggttttttgtttaggaaaattagagatttttgtttatttgtttatttgttgattttttttttattattgttttgtgattttgttaaatttttttttgtgagaaatatttaagaatgattaataaaaaaaaaaaaaaaaaaaagaatgtttttagagttttatttttaatggttttaaattggaaataatttaaatgtttattaggaggggaatggataaattgtaatatatttatataatggaatattatatagtaataaaaaagaataaagtattgatatatataatagtatggataaattttataggtagaatatagaataaaggatgttagaagtaatagattatatttcgtatgattttatttataggaaatgtaagtataaggtatttagtttatggagatagaggttagaagagtagttattttgtgggaggggataagagggaattttattttgttttgggtggtgattagatgagtggatgtattgtaataaattattgagttgaatagttaagatttgtatattttataataggtaaattatgttttaattttaaaataagttagagttacgtttaataatttaagtattatttattatagttttattaggtatttattttatttttttatagaataaatggttatttgttaaaatttaagggtatgagtggggatttatggtttgggttattaggtgaaggtggttttgttattttgtggatttcgtgttttttgtatgatgtgttaagaattatgatttaagaagtttttaaatttataggtaaatgtagttttagggaattttaggagttttatttttgttaagtagagttttttattatttataggggtagtaataattatgataaaagtgtttatggttaggcgtggtggtatatgtttgtatttttagttattgaggaggttgaggtaggaagattatttgagtttaggagtttgaagttagttttggtaatatagcgagattttgttttttaaagaaataaaaataaggtcggatgtcgtggtttacgtttgtaattttagtattttgggaggttaaggtgggtagaattttttgaggttaggagtttgagattagtttggttaatatggagaaattttgtttttattaagaatagaaaattatcgaggtatggtggcgtatgtttgtaattttagttttttgggaggttgaggtaggagagttatttgaattcgggaggtagatgttgcggtgagttgagattgcgttattgtattttagtttgggtaataagagttagatttcgttttaaaaaaaaaaaaaagtgtatatggtatttattagattttaggggttgttttttttgttttttgtttgtttgtttgtttgttttgagatagagttttattttgttatttaggttggagtgtagtggtacgatttcggtttattgtaatttttgttttttaggtttaagtgatttttttgttttagttttttgagtagttgggattaattacgtttagttaatttttgtatttttagtatagacgaggttttattacgttgattaggttggttttaattttttgattttaggtgatttatttattttagttttttaaagtgttgggattataggcgtgaggtatcgaggttggtatttttttttttttttttttttttgagatagagttttattttgttatttaggttggagtgtaatgatgtaatttcggtttattgtaatttttattttttggtttaaatgatttttttgttttagttttttgaatagttggtattataggtatgcgttatcgtattcggttaatttttgtatttttattagagacggggttttattatgttggttaagttggttttaaatttttgattttgtgatttattttttttggttttttaaagtgttgggattataggcgtgagttatcgtattttagggttgttgtatatgtttattaatgttaatttatttaatttagatggtaattttaggttagtatttattatttttgttttatagatgggaaaattgagggttagaaaggttaaatagtttttttaaagtttgttaaagttagagtagggtttggaatttaaatttggttttaaaggtaaggtattaaagtatagtatttgatttttttttagtatattttttttataataatttgtggggtttgaatatgaagttttgttttgaggtatttagaaaagttaggtagagtgtgtggaggttttatgttatatttgaagtttagtattagttgtttggggtttggtttttgtagatttgtgatgtgtgatttgtagattttaatttattaaaatttaggaatattattatggtatattgaataatagatttttatttttatagaggttttttggatgtatattgggttttagggttttttaggagattttagttttttgtgtagtttattagttagagaatttatttttattattatatatagttgtttttttattttatatgtcgttggggcgatattgacgtataggcgagtttcgtaatatgaagttatttttatattcgaagtttatattgttatttacgggataggattttagtcgtggggtataaatgttatttttaaaggagataggggttggatagcgtatagttggagagagaggaagtgggtggggaatataggattggatggataatatttgggttggggattaagtaggtgattttatgttggaatgtatgggaatggttaattggttgttaaaatattgaaatattaggttgtaatatgtgaaattgttgtttttggtaattgattgaatattgttaattttatagagtttaagcgaattgattgataaatagttattttttttagttttttgagggtcgtggtttttttagatattttttttgggatttttagatgtttagaggattttaggattatttagtatttgttttgaatggttattattaggtagttaattgtatataaaaagttatttttggttttagtattttatagtttttattaagatttgtttttaattttttgttattggtaattgatattttttggatattttgaaaagttttttgtaaaagtaattttgttatttagttaggttaagttttattttgagtaatttttaaataaaagttttggggtggtttttggtgtagtattttgagtaaagtttatagggagttttacgtttgtagatcgttttagatagagatcgggtggtttttggggtttgttattgttcgttgtttttgtatagtcgtgatgttggggatgggtataggttttgggggtaggagtaggtgagaaggtttttaggagtttagttatggttgagggtgaaggtgttattcgagatatttacgttttgagggtaggagggagtcgagtttgttagatttagagtcgtgggaataaggagatagtaatggagaaagaaggaagatatagatgagaaaaggaaagtaaaagagattgttttatatatgggaatttaagttgggagtattaattttatatataggattttgacgtttttttttttttgttttttatttgggtataggaatagtaggtaaaaaagaattattagtgggtttatggtgttttttttaggggcggcgagaggtagagagtcgcgggagggaaaaggttatttgatttttcgaaaattagagttgggttagtagttgttttattgttgttagagaagaaaaattagggagtggtaagggggatggttttttgttagggaaataataagtagggattggggattgaattgaagggtgaaatttttgttttgtttttttgatgttaatatatttatagggttaatagattttttttataggttttgtgtattgtttttacgttttatttatttatgcgtgtatatgtgtattatatacgtatgtttataaatacgtaggtaaatatatatttgggttcgtgtgtgtatatatgtattttgtttttgtgtgaatagttaatagtttaaagtatataaatttataaattatttaagatattgtaaaatattttatttaagtaaagttttagtgtttttttgggttgtattaagtgggttttattttttgagagtttagaatagttttgtttttttgaagataaattttcgaggggggtgaaattaatttttttagaattttttgataaataggaagattgataatatttttttattttttataatttttttttagagataatttaggtggaaaaaatgaaattaatatttagttttggagataggaaaaatgtttataatatttttacggaaagtttagtagatgaaatttttaattggtaaagtaaatatatttggggttggttatttaaaggaataaaatttttgcgggggttgggatatgtttttaaattataatttatatttgtatgaaatgtaggaagtaaagaaatttgaagttagtgtgttagtttttttgatttatagaagtttttttaatatttttttgaataatgtagggtaaaaataaataagattaataaaaaaatgaatatgaaatttttttgaagtgattatttaggttcgtaaaaatttttttgatttataagtgagtttttagagaattgattgaatttagaagatggaggttgtagtgagttaagattgtgttattgtattttagtttgggtaatagagtaagattatattttaaaaagaaaaaaaaaaaataagatcgggtatagtgatttacgtttgtaattttagtattttgggaggttgaggtaggtggattatgaggttaggaatttgagattagttcggttaatatggtgaaatttcgtttttattaaaattataaaaaattagtcgggtgtggtggtaggggtttgtaattttagttattcgggaggttgaggtaggagaattatttgaattcgggaggtagaggttgtagtgagttaagattatgttattgtattttagtttgggtgataagagtaagattttgttttaaaaaaaaaaaaaagagtatataaattgagattttttttggatagggttaagtgtatgaaaattaggatattttggtgttagggattttaaagtggttgttgtggtagagttgttagtgttttttttgttttttaagtattttttttttttttttttatagtaagagatggttaggggaatatatagttatttagttaaagattatattttttagttttttttgtagttaggtagttaggtgatttggttttggttaatgggatgttagtagaatttatgtatgttatttttaagttatgtttttaaaataaaaaggtagtgtgttttttttttttatgggttggaatataaatttagcggagattcgttttttattaggaggatgagggtaatatgttggggatgatagagtaaatagatagaggagtttgggtgtttgatatagtgttgatgttatattagttttgtatagttatttagattgttataagagagaaataaattatcgtaaaggtggggggtatttaaggatgtttataaatattgtagttttgtttttttttaattatatggtaggataggatttttttagttatttgttttagttaataagatgtgagtataagtgatatgtattattttttgatggaagtttaatgtagtttttattttgttttttttttttgtatggtaacgtttgagatggtggttgttttattagttaagatttttgggtgatatcgaaagtatagtattagtcgggtatagtggtttatatttgtaattttagtattttgggaggtcgaggtagggggattatttgagtttaggagttagagattagtttgattaatatggtgaaattttatttttattaaaaatataaaaattagttgggcgtggtggtatacgtttgtaattttagttgtttaggaggttgaggtaggagaatcgtttgaattcgggaggtagagattgtagtgagtcgagattatattattgtattttagtttgggtgatatagggagattttgttttaaaaaagaaaaaaaaagcgtaatattcggttgatttttagtggataagtaatatgattaaaaaataaatttttgttattttaatttattgtatttttattaatgtaggaaaaaaagtatttatttaatatgtaggaaatttaaaaatgatttatttttttttatattggttagaaggtttttttgttgattttttatgtagcggtagttagttaggggttgagtttagttaatagtaggatagtaggttttttttttttagtttttatagtatggtagttttaggataatttttgaggaatttaaaatataagttgtaaggtttttcgaggtttagttttaaaagttatataatattatttttgttatattttattggttaaagtaaattataaggttagtttagatttaagattggaggtatagaatttattttttgataggaggaatggtaaagttatacggtaaaggggtaggtatattagaataggagagattgatggttatattttgtaagtttttttatggtaataaatatttttaggttgttggttattagaacgtaatgaagtttaatttgattgaatatttaaattattaaattttgggtgttttttaaagttattaaattaatatgtaatagttgtttttaaaagaaagggttttttttttatgagttttttttagtatttgttgagttatattaatttggtatagtgtggtagaatttattttttttttttgtttaagtaataaaatttttaagttttttgggtttatagagtatgtttttaaggagaagtgtttattttttaatgtataaaattttttttttttttattagttggaatgtggatagaatggtggattttggaatagttatttagattataaaatggaagttatatgtggatgatgataaagaaataaaattaaagaggttttgttttttaattttgtagagttaataggattgatttggattatttatgtttagattatttaagttgttgttattttagtttggttataataaagttaaattatgtttaattgatatatttagtaagaaattaatgtgagagttaaaggtaatatttagagaagtgtgtttattaggatatacgttaaatttttgtaataaagagattttaaaatatagtaatttaaataagatagaattttgttgtatttttaaataagagttttagaggtcgggcgcggtggtttacgtttgtaattttagtattttgggaggtcgaggcgggtggattataaggttaggagatcgagataattttggttaatacggtgaaatttcgtttttattaaaaaatataaataattagtcgggcgcggtggtaggcgtttgtagttttagttattcgggaggttgaggtaggagaatggtaggaattcgggaggcggagtttgtagtgagttgagatcgcgttattgtattttagtttgggagatagagcgagattttattttaaaaaaaataaataaataagagttttagaggtcgggtgcggtggtttacgtttgtaattttagtattttgggaggtcgaggcgggcggattacgaggttaggagatttagattattttggttaatatggtgaaattttgtttttattaaaattataaaaaaaaaaaaattagttgggtgtggtggcggcgtttgtagttttagttattcgggaggttgaggtaggcgaatggcgtgaattcgggagatggagtttgtagtgagcggagatcgtgttattgtattttagtttgggtgatagagtaagattttattttaataaaaaaaaaataaaaataaaataagaggtttagggtaagtagataaggttgagatggcgtgtgtggttttggttggtagagttgtttattagttttttttaggtttttagtttttttttatttgtggtttatgtttttggaaattgtttttgtttgtatggttgaaatagggtttttattaagtttgttttttattttatttttttatttatattttattggtaaaaagttagttatagtttattgttagttttttaggaggtttagtcgaatgtggaaggattatgatttgatttgtggggttaaagatgttagatttttatttttttcggtattttcgattagttttttagtagattttattagatgagggcgattttggtttttttattttttgtattatttaaaagtttagtaaatgtaatcgtgtttttattttaggtagagggaagtaggtgaataatatttaaaaaatagatatgttttttttgttagttttttttattttgtttaaatttttttttattaattttaggtttttaatatttgtttttaagggtataattttaaagagaaaaaattaatattttaattttgtattttattttttagttagagttggatttttgtttttggtttttttggttttttgtttttgagataaagttttgttttgttgtttaggttggagtgaagtagtacgatttcggtttattgtaatttttattttttgggtttaagggatttttttgttttagatttttaagtagttgggattataggtatgtgttattatgtttagttaatttttgtatttttagtagagatggggttttattatgttggttaggttggttttaaatttttgattttaggtgatttatttgtttttgttttttaaagtgttgggattataggtgtgagttattgtgttaggttttttaattagagtttaaaaattagaaatgatgttttgatggttttttaggatgttttatttttttttggagagtttagtattttgtagttgaaaatttttgaggaaacgtggtatatagtagaggtcgattttattttagtggttagtttattttttatttagtttggttatttgggtttggatttcgcggttattttaggatttgttattttttaattttttatggtaattgtaggttaatttttaaattggaaaattagtttggtttggtttggtttatagttttaatgtgtgattttagatggggatttagtattgttttgtaagttttttggtggttttagtggatttgtttttgttttattatattttttgggttttattattggggtgttttattgatttttagttgtagtatttttgtttttatttaaggattgtttttggtgttttgtattatttgtgtatagaaagttggaaatgatagagaattaaggtttttaattaatgattgattggtataaatattgggtttttttattttggattatgggataattttgtattattttagggtttttgagtgggattgatttttatttatttataatggtaaatttgtttgataatatattttttattgattgttttttttttttattatattttattatttatgttttttgcgattatttttagaatgtattgtttgtattggaatttttgtttttaggtttgtttttgggggaggaagattttatattagtaggatatagtgttagatagtatttttaagttttaaatgtaggtgtttatttaatttttatagtaagtttatgatataggttttgttgttatttttattttatagatgagggaattgaggtatataaaggttaagtgagttgttttaggtttatataggtattaagtagtagagtcgggatttaaatttaggtagtatggtttttgggtttatatttatagttattaagtggtagtgttttttttttacgttttttttttagtgattgttgggagttttttgcgtatttttgaagtttattttagttttttgtatttttaagtttttttttttttaggttttttttttttggtatttttttttttataatatttttttttttattttttttaaattttttattttttagatttttataagatttgtttacgttattttttattttttagttatttgtgtatttgttttaagttttttagaggaaggatttaggagttttttttttaaataatgagttatttaagtaaggttaagttaatgtttttttttattttatttttattttaagtaaatagtattttttaggttagtaatagaattggttttggttttttatttattttttttttaataaaaatatttatattgggttagattttatttatttttatataaaggtttttgttaagtttttcggtatttatattattttttattttagtaggtattgtttattaattttgaagtgattgtttaattatgattttgaggaatttttatatatattatttttagagttttagaaagggttttgttttgttttatggggtttttttttatgtttaggtttttttagggttttgggttttagaggttattttgtaggtttagatattgggttagatattgaattttttgtttttgtttatttattgtataaataatttttgagaatggaacgaggaattaaggggtggggtagggttttttaagaaatagaaggtttgtttttgattttttgtaggcgttatattttttttagataaaaatttaatttttaaagatttataggtttggggtgtattagggtgtttatttgtttatatcgtagtttttattttagttttttgaggtttttattgtttttgggttggtggggggtatggtgtatgttattatttattttttgttatttattagggaagttgttttgggtaatttaggtaagagggtggtaaatataatttaggtgtttaggggttagttgaggatgggttagggggaggggtggtttatggttgaattgttttggtttcggtttttattattttaattttagttttgggtttagtattggtggtagtgggggttttattagttttttttgtttttttattgaaaatttttttttaatgtttttttttattttggggagtggggagatatttattttttttttagttttgggtattagtatttttttgataaaaggatagtttggggtttatatgggagaatttttttgtttttatttttttagtgttgttaaggggtgaagagggaatttgtttagtagaaagatatacgtttatgttttgtttttttgtttaatataaatgaaaggttatatttgagaagagttttttttgtttcgtttttggttttagttttagtgtggtatgaggaatttaggttttgatttaagatagtttggaattttaggtttggtttggtaaatttattagttatttcgtagttttatttattttgttttgttatttgttatttatagaattaatagtaaaatatattttttttaaggttatttttgagaattaggattattaaaaggagaagatcggttattttataggtataaaaggtattaggatatttgttttagtatttattgttattaagaggaaatgtttggaaatttttacgtttattaataggggatagatatagtatattgtggtatggggataattgaatattacgtagtttttgtaagtttaaggtttatttgtgtgtatagagttgaatgtttttagatatatatgttatataatatatatttttaaattagatagatatttagaattgtatgtatgggatgttattatttatgtaaaaaaaggagggaaagaggatagtagttatatatgttttttgtgtgtatataattttattggaaaagtttataaaaaattggataggagagttgtttttggggagaattgggggttggaaaatgaggtgggaggtaaagaaggtaatttaatttttattaaattttttttattattttttgtagtttttattgggtatatatgatatttatttaaggttaggtttagtggtttacgtttgtaattttagtattttgggtggttaaggtaggtggattatttgaggttaggagtttgagattagtttgattaatatggtgaaatttcgtttttattaaaaatataaaaattagtcgggtgttttggtaggtatttgttattttatttatttaggaggttgaggtaggagaattgtttgaatttgggaggtagaggttgttgtgagttgagattgtattattgtattttaatttgggtaataagaataaaatttcgtttttagaaaaaaaaaaaaaagaaaagaaaagaaaagaaaagaaatattttattggattattaataagagattttgatataatttttttgtagattaagttttattttgtaaaattttaaatatattgtaaagtagagagaatagtaaaatgaatttttatgtatgtatttattatttagttttagtttatagacggtttcggtttatagacggtttgggtttatgtttatatattatttattaattattttttttaggaattttttttttttttttttttttgagatagagttttgttttgttatttaggttggagtgtagtgatgtaatttcggtttattgtaatttttgttttttaggtttaagttttttgagtagttgggattataggtgttcgttattatatttagttaatttttttgtatttttagtaaaaatggggttttattaatttggttaggttggttttgaatttttgatttcgtgattcgtttattttagttttttaaagtgttggaattataggcgtgagttatcgtttttagttaggatttttttttttttttaagttaaagatagggttttattgttatttaggttggagtttagtggtgtaattatagtttattgtaattataaatttttgggtttatatgatttttttattttagttttttaagaagttgggataagaagtatgtattattatgtttagttaatttatttatttatttatttttgtaaagataggggttttagtatgttgttcggattggttttaaatttttagttttaagtgatttttttgttttagttttttaaagtgttaggattataagtgtgagttattgtgtttggtttcgaggaatattttttttttgagatggggttttgttttgttgtttaggttggagtgtagagatttgattatagtttacggtagttttaaatttttgggtttttataatttttttattttagttttttgagtagttgagattataggtatatgttattatattaggttaagttttttttaattgtttattttaattagagatgaggttttgttatgttttttaggttggttttgaattagttttaagtaattttttaatttaggttttttaaagtgttgggaatttattaaaaatttttttacggaaaagtttaaattttttattttaaaatattttttttttttttttttttagaatattttttatttatataagagtatatttttttttttttttttttagatagagtttttttgtgttatttaggttggagtgtaatggcgtgatttcggtttattgtaattttcgtttttcgggtttaagtaatttttttgttttagttttttaagtagttgggattataaacggttgatattacgtttagttaatttttgtatttttagtagagacggggttttattatgttggttaggttggtttttaatttttggttttaggtgattcgtttattttagttttttaaagtgttgggattataggtatgagttatcgcgtttggtttttttttttttttaaaattttaatttttattttagatatagggggtataggtgtaggtttgttatatgggtatattgtattaggtagttatagaattaattaggtaattttttaatttatattttttttttttttttttttttagtagtttttagtgtttattgtttttatatttatgtttatatgtgtttaatatttagtttcgttataagtgagaatattaggtatttggttttttgtttttacgttaatttatttaggattttgttttttagttttatttatgttgttgtaaaggatatgatttaattttttttttttatggttgtaaaattatttattttttattttttggtttttattaaaataaaatgttttttttgaattataaatttataaaatattttattgttttttgtattataatttttttttttttttttttttttttgagatagagttttattttgttatttaggttggagtgtagtggtgtcgttttggtttattgtaattttcgttttttgggtttaagcgatttttttgttttagttttttaagtagttcggattataggtgtttattagtacgtcggttaatttttgtatttttagtagagacgaggttttattatgtttgttaggttggttttaaatttatgattttaggtaatttattcgtttcggttttttaaagtgtttagattatagatatgagttattatagttagtttttttttttttttttttttttgttgagatggagtttcgttttgttatttaggttggagtatagtggcgttattttagtttattataattttagtttgggtaaaaggagtaaaattttgttttaaaaaaaaaaaaaaaaagggtagagaattaatgtttagagttaatttgtaattattgtagagtgggaagtagtagatagatgtttttgttttttgttttttaggtggaaagcgtttggagatatttagttttttttttaggagggtttgggggaatcgaattttattgtatataatagtgatattattttttttttttttttttttttgagacggagttttattttgttgtttaggttggagtgtaatggtgtaatttttgtttatcgtaattttcgttttttaggtttaagtaatttttttgttttagttttttaaatagttgggatgataggtatatgttattacgttaggttaatttttgtaattttagtagagatagggtttcgtcgtgttggttaggttggtttcgaatttttgattttaggtgatttatttattttagttttttaaagtgttgggattataggcgtgagttattatattcggttaatattatttttttaaattggtttttttttttttaggattttatattttttatagtttcgtttttgttttttgggattatttaaattaattatttacggttaagttttgttttaagttttgttgttagggttattaaaattaagattatttttttttatttttttttttttataaattattgttttttttttataaattttttttacgttagtaaatttagattgtaatattaatatagagttataatttatttatatattggtttttttatatttttggagtataaattgttaaagggtaggaacgttgtgatacgtttggtttttttattgtttagtgggagagagatatgtgagttagttagcgttatatcgagttgaggtagttattgaggttttttatgaattttttcgttttttgttttttaggtatatgataggatggaattttttagtttttttgaagttaggttattgtaagaggtttaattggtttgttttggttagtgaaataagagtagaagttatatgtgttgttattgttaggtataagtatttaattgttaatgtaatataagatattttagtatttttttttgatggagttttttttgatttggatgtttgagtgattatgatgattagagattttaatatttttattgatttaatagagagtaatagtgagaaataaaattgttgtgttaagttattgagattttagggttgtttgttattgtagtatgatgtagttattttgattgatataagttgagataggagtttatataaagtttatagggatataaataggggaatattaggtttttttagaagattagaaaggttttattaatgaatttgagatagttttaaaagatgagtgtttatttgataaggaagagatgtaagtatttaggtgagtaatgaaattttagagcgtattaaaggaattgtaagtttaggattttttagggttggggagggaaggaaggttataatgatattagattagggaggaaggagagaatgttttatggaagaaatagtatttatagtttgtaaggcgatttgttatatggaattttagataaggaagtgatatgatttgatttgtattttagaaatattattttggaattagtatgtaggggttggaagattagttaagagatatttagagttttggtaagataataggggttaaaagtaagtatagaaatgaggaagggaaagttagtattaacgttgaggtatagattacggggtttttgagtttttttttgatttttagaatatttgggtgttttattatattgtattatgattgtttgtttattgtttttgttgttgttgttgttgttgtgatggagttttgttttgtcgtttaggttggagtgtagtggtgtgattttggtttattgtaagtttcgtttttcgggtttacgttatttttttgttttagttttttaagtagttgggattataggcgtttgttattacgtttggttaatttttttgtatttttagtagagacggggttttatcgtgttagttaggatggtttttattttttgatttcgtgatttattcgtttcggttttttatagtgttgggattataggcgtgaattatcgcgttcggtcgattgtttgtttattaattatagtttttttttttttttttgagacggagttttattttgttgtttaggttggagtgtagtggtacgatttcggtttattgtaatttttgttttttaggtttaagcgatttttttgttttagttttttaagtagttgggattataggtatatattattacgtttagttaatttttgtatttttagtagagatggggttttattatattggttaggttggtttcgaatttttgattttatgattcgtttatttcggttttttaaagtgttgggattataggagtgagttatcgcgttcggttatttaggtaggatttttatgtgatagttttgaggtagaattttttttttgggaaatttaagtttttgttttttaggttataatattaagagtaattttttggttgggcgtggtggtttatatttgaaattttagtattttgagaggtcgaggtaggcggattataaggttatgagattgagattattttggttaatatagtgaaatacggtgaatataaaatttaattgggcgtgttggtatgtgtttgtaattttagttatttgggaggttgaggtaggataattatttgaattagggagtcggatcgtaggttgtagtgagttaagatcgcgtttgggtgatagagcgagattttgttttaaaaaaaaaagggttaggtacggtggtttatgtttgtaattttagtatttttggaggttaaggcgggtagattacgaggttatgagtttaagattagtttggttaatatagtgaaattttgtttttattaaaaatataaaaattagtcgggtgtggtgtttgtagttttagttatacgggagtttgaggcgggagaattgtttatatttaggaggcggaggttgtagtgagtcgagattacgttattatattttagttagggtgatagaatgagattttattttaaaaaaaaaagagtaaatttttttatttaacgttagttgagtatagatggtaatgtttttgtttcgttttatttttttgagatggagtttcgtttttgttgtttagatttgtttagattggagtgtaatggtacggttttagtttattgtaatttttgttttttaggtttaaatgatttttgtgttttagttttttaattagttgggattataggtgtttgttattatatttagttaatttttgtatttttagtagagatagcggtttattatgttggttaggttggtcgcgaattttttattttaggtgatttgtttattttggttttttaaagtgttttaattattggcgtgagttattgtgtttagttaagatgttagtgttatttataaaatgtttttattgaagtatttagattatagttaggtatggtggtatgtttgtagttttagatatttaggaggttgaggtaggagaattatttgagattgggagtttaagtttagtttggagaatatagtgagagtttattttattaagataaataataatgtaaatgtgtatatatatagtgtttaagggtattatagttttgttaaattgatatattttttttttttttttttttttttttgtggaaatagggttttattattttatttagagtggttttgaaattttgggtttaagtaatttttttattttgtttttttaaagtgttgggattataggcgtgagttattgcgtttggtttgatatataaaattaattattatagagttattaatgtggtaattaattttttttttttttttttttttttttttgagatggagtttcgttttgttatttaggttggagtgtagtgatatgattttagtttattgtagtttttgttttttaggtttaagcgatttttttgttttagttttttgagtagttgggattataggtatatattattattttggttaattttttgtatttttagtagagatagggttttattatgttggttagattggtttcgaatttttgattttaggtgatttatttgttttagttttttaaagtgttcggattataggtgtgagttatcgtgttcggtttggtaattaatttttaaagagtatatggtattatttagagagaatgagataaaggtttagaaggttaaaggtattaatagaggaaaaggttaagataggaaaggagtgagggtttatagaatagattgaaattatagaaggaagggagtttggatataggggtgttatggaaattagggaaaagtagtggattaaatagtgtggttaagtatgttatagattgtagaaagtttaagtaagaggagtattgaataatatttattaaatttgaagtttttatatttttttttttaagaagtaatagttttatggttggtgtataattgttttagaaaatagtttagtattagtagggaagttgaataggtgtagattttaatatttagtaattttatttttacgaatatgtggatgtttgttatttagattgtggtttatagatagatagtattagtattagtaggaatttgtagaaatgtagaatttggttaggtacggtggtttaacgtttgtaattttagtattttgggagattgtagtgggcggatcgtttgagtttaggagttagagattagttttggtaacgtagtgattcggttttaaattggaaaaaaaaaaaaaaaaaaaaagggttagatatggtggtttatgtttgtaattttagtattttgggaggttgaggcgggtaaattatttgaggttaggagtgcgagattagtttggttaatatggtgaaattttatttttattaaaaatataaaaattagttaggcgtggtggtatgtgtttgtagttttagttatttgggaggttgaggtaggagaattgtttgaattcgggaggcggaggttgtagtgtgttattgtattttagtttgggtaatagagcgagattttgttttaaaaaaaaaagagagagaaaaaaaaaaaaagaaagaaatatagaattttaggttttatttagatttattgatttagatttcgaattaaaattttagatgatttatgtgtatgttgattttaagaagtatgtaatttttaaatttttttgtttatattaaaagaattttgtaaattatgtattttttgtatgtttttatgttgttatttaaaattttttttaaatgtttagttgtaaaagaatgttattttagtgtgttgtaaatatggattttttttaaaaagttttattttattttttaattattttttttatgatttattttatttttttttttatgtatttatttgtttattttttgagataagagtttttttttgttttttaggttggagtgtagtggcgttatttcggtttattgtaattttcgttttttaggttttagtaatttttttgtttttatttttcgagtagttgggattataggtgtttgttattacgtttggttaattttcgtatttttagtagagacggggttttattttgttgtttaggttggtttcgaatttttgattttaggtgatttattcgttttggttttttaaagtgttgggattataggtatgagttattatatttagtttaatttattttatttatttattttttattttatttttaagatggaagtttgttttgttatttaggttggagtgtagtggtacgatttcggtttattgtaatttttgtttttcgggtttaagagattattttgttttagtttttcgagtagttgggattataggtatgcgttattacgtttggttaatttttgtatttttagtagagatgggggttttattatgttggttaggttggttttgaatttttgattttaagtgatttatttgttttagttttttaaagtgttgggattataggcgtgggttatcgtgttgggtttatgatttatttttaaagtatatgattataattttttttaatagttagaaattttatattgttttattttttttgaatttttatttttatagttttatttttatttttaagatattattttaatgtaatatattttgtgtttgaaagttttttaagtttgagtaatatggtaaaattttgtttttataataaataataaaaattagttgggtgtggtggcgtgtgtttgtagttttagttattttggaggttgaggtgggaggattatttgtttttggggaggttaagtttgtagtgagttatgattgtgtattttagtttgggtaatagagtgagattttgttaaaaaaaaaaaaatgagtaaagaatttgaatagatatttttttagagaagatatataaatggttaataaggatatgaaaagatgtttaatattattagttattaagtaaatgaaaataaaattataatgagtataattttatattaattagaatgtttatttaaaaaaaaaaataagttaggcgcggtggtttacgtttgtaattttagtattttgggaggttgaggtgggcggattataaggttaggagttcgagattagtttggttaatatggtgaaattttatttttattataaatataaaaattagttaggcgtggtggcgcgtgattgtagttttagttatttaggaggttgaggtaggagaattttttgaattcgggaggtagaggttgtagtgagttaagatcgtattattgtattttagtcggggtaatagagtgagacgttgttttaaaaaaaaataaaaaataaaaaaaaatagaaaataataattgttggtaaggatatggagaaattgaagtttgtgtataattttttggtgggaatataaaatggtgtagttgttgtggaaaatagtttggtagttttttaaaaggtttaatatatagggtgggtatagtggtttacgtttgtgattttaggttgagaggaatttgggaagttaaggttggaggatcgtttgagtttagtagttcgagattagtttgggaaatatagtaagattttatttttataaaaaaaaaaaaagaggtgggcgggggagtaaatgttatggtttacgtttataattttaataatttgggaggttaaggtaggcggattttttgagtttaggagttttagattagtttgagtaatatggtgaaattttgtttttataaaaatgtaaaaattagttaggtatggtggtgtatatttgtagttttagttattcgggaggttaaggcgggaggttaagtttgggaggtggaggttgtagtgagttaagattatattattgtattttagtttggttaatagagattttgtttaaaaaaaaataataataataatacgttaaaaatttaatatataattgttatataatttaatagttttatttttaggtatatatttaaaagaattgtaaataggtatataaataaattttagtataagtatttaattaaaagataatgaatgaattatagttatataagttaataaaattataatgttgagtgaaaaggttagttttagaatatgtatagtatgatttatttgtgtgatggttaaatagataaaattaaattgttcgggaaaatttataattgtatagatattgaaattattataataagtaaatgaagtatatacggttatattttagagatattttgggtttcgttttagatttttttaataaagttagttatattaataattttttggttttttagtgtatataagttatgtttatattgtattgtagtttatttagtgtgtaatagtatacgtttaaaaataatgtatgtaattttaattttaaaatattgtattgttaaaaaatgttaatagttatttgagtttttagtgagttgtaatatttttgttggtggaggattttattttgatatcgatagttgttgattgattagggtggtggttgttgaaggttgggatggttttgataattttttttttttttttttttttttttgagatgaagttttatgttgttatttaggttggagtggagtggtgtaatttcggtttattataatttttattttttgggtttaagtaatttttttgttttagttttttaagtggttgggattataggtatttttattatatttagttaatttttgtgtttttagtagagattgggttttattatgttggtttaggttggtttcgaatttttgattttaggtgattcgtttattttagttttttaaagtgttgggattataggagtgagttattttatttagttaataattttttaaaataagataataatgaaatttgttgtatttattgattttaatttttataaaaagatttatttgggtcgagtacggtggtttatgtttgtagttttaatattttgggaggttaaggtaggagtattatttgaatttaagaatttaagattaatgattgggtaatacgggaagatttagttttgttatttttaattaaaaaaaaaaaaaaaatggtcgggtgttgcggtttatgtttgtaattttagtattttgggaggttgaggtgggcggattatgaggttaggagtttaagattagtttggttaatatggtgaaattttatttttattaaaaatataaaatattagttgggcgtggtggtagacgttcgtaattttagttatttaggaggttgaggtaggagaattgtttgaatttgggaggtagaggttgtagtgagttgagattgtattattgtattttagtttgggtaataagggcgaaattttattttaaaaaaaaaaaaaaaaaaaaaaaagttagaagtggtagcgtacgtttgtagttttagttattttagaggttgaggtaggagaattatttgaatttggtaggtggaggttgtagtaagtcgagattgtgttattgtattttagtttggcgatagagtaagattttgtttaaaaaataaataaataaattagtttaggaaggtcgaggttgtagtgagttttttttgtattattgtattttagtttgagtaaaagaaattattttttttttttttttttttttttgatagggttttgcgttattatttaagttggagtgtagtagtgcgaataaggtttattgtagtttttttttttttgggttgaattaatttttttattttagtttgttgaatagttgcgattataggtaatattattttttatagttattttttttttttttgagattgggttttgttttgttgtttaggttggttttaagtgattttttttttttggttttttaaaagtgttgagtttataggcgtaagttattatatttagttttgtatttttttatattttttaaattttgaataaaattttataatttgaatttggaattgtatttatatattttgaattttgaataaaattatattttgaattttgaattttgaattttgagtttgtaaataaaattttataaattttaatgtttttattttgttttttttttttttttaagatagagttttatttttgttatttaggttggagtgtagtggcgtgattttaatttattgtaatttttgttttttaggtttaagtaatttttttgcgttagttttttgagtagttgggattataggtatgtattattacgtttagttaattttttttgtatttttagtagaaacgaggttttattatgttggttaggttgtttttaaatttttgattttaaatgattcggttattttagttttttaaagtgttgcgattataggtgtgagttattgtattcggttttataaattttaatttttaatttgatagttttttgtatttttgtttttacgaatgattttatgaaaaaaataaaatgaataattttttttttaaatttgggatatggattaggttatttgtagggatataggtaggtttggggaggataatttgatttaggtaggtattataggttcgaaagttagttgtttaagtagtaaggatgatatagggtagtagagtagatttggtgaggtttagaggatagaatatttgtcgagaagtggaagagtttttttttgtttggaatttataaggtgttgggagaatttgtttttatttttttagatagatttggatttgggtagagttagtaagggtgtgtggaggatttggacgatggtaaaggtggtgggttgtagggagtaaatttttttcgaggtaggagggggagggaagagtttgtttggaggtaggttgaggttgggagagggtttcgaagagttagggataaggagttttgaagaaggaggaggagttagtattgaggagtagttaagggggatggatgggagtttagaaaaggtggttttgtagatggatgggagtggtgtaggtattttgtttttatatggtttttttttttaagtagtaagttttttttaatattgttaaaatattttgtagtttttattagggtttttgcgttgagggtagagttgagtgtagattaaaggagaaagagaaagaagttggaggttttgttgtaatgtaagatagttttattagtttatggatttaaaagtttaggttgatttattttttttttttttatagattgtttaggaaatatggttattttagtacgtgttaagtatcgttgtaaaaagtaagtttatagtttaaaatattttgaatgttttagataaatgtttaatgtttgttacggttttggattattaaggttattttttatttttatgagtagttaagggtagtgttttaagttgtgagttagttttttttagagatgtttataaatataaatatttttttttaaagtaagttgttatggatttataggattggaaaatattttagagagtaatttttttattttattaaagagaatattgaaatttggggagttttgatgattttaagatggattggaatttggattttttgttttttagttattttttgtatttttagttaaattttattttttttaaaaaatgtatttatttttatttattattatttttgagataggtgtttcgttttgttgtttaggttggttttaaattttcggttttaagtgatttttttattttagttttttaaagtgttgggattataggtataagttatagtgtttagtttagattttatttttaaagtttattaagaattttaatttttttttaaaagatagggttttattttgttgtttaggttggagtatagtggtattattatggtttattgtagttttaattgtttgggtttaagtagtttttttattttagttttttatgtaattgggattttaagtatatatatattattatgttttgttaatttttttattatttgtagagatggggttttgttatgttgtttagattggttttaaattgttgggtttaagggatttttttgtttcggttttttaaagtgttgggattataggaatgaattattgagtttgatttaaaaattttaaaagtattttttaaatttatttgtttttgatattatattaaggtatttggtattgtaagttaaggataggaaagtttttggttttatattggtagaagttggggaagaagggataaggatttagatgattgtaaattttttggatgggatgtatgggaaatggttttatattatttttttattagattatatggaaaagagtttgtgtatttttgtttgtttttacgtagagttgtaattgggtgggttggatatttgaaggatttattggttgttaattttatttgttattaaggattatttgttttgagttatgggttgagattaggttttttgttttatttatatttttagaaaggaaaagtagtaagaaagggataagaaataaaattttataaattttaatttttaatttgatagttttttgtatttttgtttttattggaatgtgaattatttttttgagaagtttggtaatgcggaaaagaagagatgagatagaaaaatagaatttttaaagtttttttgggttaggcgtagtggtttacgtttgtaattttaatattgtgggaggttgagtaaggtggattattcgaggttaggagttcgagattagtttggttaatatggtgaaatttcgtttttattaaaaatgcgaaaattagttaggtatggtggcgggtatttgtaattttagttatttgggaggttgaggtaggagaattatttgaatttgggaagcggaggttgtagtgagttaagatcgtgttattgtattttagtttgggtgataagagtaaaattttagttaaataaattaattaattaattaaaataaaataaaatttttttgaaaattttatagttcgttttttagattaggaaaaggagaatagagttattgtttatttagtaattattgtatgttaggtttatttaaattttatattagttttgtgagagattagggtttttaagataaaaatgtttttagatgagttaaggatgggcgggggagataaagataaggatattgtgatttagagaattaagtaatttgtttagtgggttttatttggtataggaatagggtttttattttatttttttaatgatttgcgaatttggtagttttttgagttagagtaggtttagaaatttttaggaatgtggttttaagtttaggtgcgtttgatataaaattaggtgtttttttttaaatttataaggtttaaatataaagagagtagtttagaatagatttttagatttaatagagggaattgggtgcgggtatataaattagagaatttaaaagaaaaaggtaaaaagttaaggtattatttaaatattgtttacgttgtttttatttttttgttaaatagtattttttgagtttaagaatttagttttagtttaagaataaattttttatgggtggatgttggttgagttaaagaggaattattttaataattatttgttgtatgattttttttggtgttttgttttgagaaggagttttgttttgtcgtttaggttggagtgtaatggcgtaatttaggtttattgtaatttttattttttaggtttaagcgatttttttgttttagtttttttagtagttgggattataggtatttgttattacgtttagttaatttttgtatatttagtagagttagggttttattatgttggttaggttggtttcgaatttttgattttaggtgatttatttgtttcggttttttatagtgttgggattataggcgtgagttattatattttttttattgtatgatttttatttgtaaaataaaatttataatataatttttgtaattaagaagtttatagtttaatggggaaattagatattgaatatataataagaaattttattagaattgaaatgtaaggaaaacgtattagttttttgaaggacgtaaaaaagaaatttaattggtaggaaatagtggtatttttacgcggatttggataggtggggaagtgggtgtaggtacgaggaagtggaagggaaggtattagtttttaagacgtttttaagtgttgtcgttgaagttgtggagattataatttagtttgagagagataagagaaagagaaggttcgggcgtagtgttgaagggaagttttgtttagagttggattttgttagtttggaggagaggtgaggaataagggggacggagcggtggaagattagagtagaattatattaatataataaattatattattaaaattagttttagggttaattatatattaaaggtgaaatgggtaaggttatcgatagtataagcggagggcgattgttttggtaagaagttgggattaattttgagaatggaggggagggcgggtgtgattttaaaggattgatatggagtggaggaaagttgagggtattggatcgtttggttttgtggaaagtgaaattatattttaggtttgaagggttgaggcggttattagttttataagagttggaaaagtttgggaatgtgtttggagtaattgtgagtatatttagtagaggaggtaggcgtgggtaatagttattaatagttttgttagttacggggcggatggggttttgagaggtgttacggatgtatttagggtagcgttcggtatagttggatcggagacgtattatttttgggagtaggtggtagcgttcgtagtcgagagaacgggtgcgcgcgcgcgttgcgggatgcggcgcgggcggggcgcggggacgcggagcgagtagcgttatgggtagtcgggattggggggcgggttcgagtgagcgggttttcgcgcggtatttggtacgtacgcgtaaattggtcgcggggtttggaggtatagaggagggggagcgagaaagaggggggtgtggaacgtattttcgttttggcggataaataatttcggttaaagaggaggtaaggtcgttcggttttttaatcgcgtgggggtgttggtgaagaaaggggggtcgggaaggggggattttgtttttttaatttttttttttttttttttttttcgagttttagtcgacgtcgtcgtcgtcgcgcgcgcggggtttggaatatacggtacgagtcgttttcgtttttttttttttacgtttacgcggagtcggtttcgcgcgcgcgcgcgtttcgtgtattttcgcgtttgcgcgttgtttaggttttgttcgtgtgtgggggtcgttgtcggtttcgggggggggtggggaaaataagggattaaaaaaatagcgcgcggaatcgggttaggtgagaggagcgtgtatttagggtcgtggggttgggggggcgtgttacggagttttgagcgtgggggtagggcgtgtacggtgcgtgttggcggcgggggggaggacgtgaaaagcgcgtgtaaacgtgtaaggggggggcggaggaatgaggtagtcggtaaagggggcggggtgagaagagtttgtaatcggggttattttggagtttagagttttaggtttttggttttttttttttttcgtttttttatcgtgggcgcgcgggttcgttttattttagcgggttgttgggttggggggtgtggacgtcgttgtttcgttttcgagaattacgtttttttttttttagagggatagtatttttttagggttggggaaattgaggaagaaatttgaagatcgggagatcggatgtcggggggttgggtaagaatgggggcgagggttttggagttttggtttcggagagttagagatttttgtttttgatcggttttttttttaattagggttgtttattttcgttataatggtttttggggtggaagttttgcgtttttagttgttcggttacgaggtcgtaacgttacggaatatgaattagtttcgggtagaggagcggttttgcgacgtgattattgtggtcgatagttttaagtttcgaggttataaggttattttggtcgtttgtttattttttttgcgggattagtttttgttgaattttagttcggagttgtaggtttttttgatgtatagtgtacgtatcgtggtcgatttgttttttttttgttatacgggcgttttggaattcgttgttagggatatcgttaattattttatagtcgttttttatttgtagatggagtacgtggtggagaaatgtcggaatgtttttagttagtttattgagtttaaaataggttttaaagaggatggggttagtgaggttagttttgtgagtagtattagcgttattaagttttttttttttttagttaggattttaaagttagtttcgaagtttttatttttattttttttattttttttatttttgcggttagtgaagttggagtttttattggatgaagatttggagttgaaagtcgaggaagaggatgaggatgaggatgaggacgtgtttgatatttgtatcgttaaggtggagtcggttttggaggtggtatatcggtttaaattttttggaggtttgggagggggtttgggtattggaggtttcgtgggtggttattttggggagttggtttagagtagcgttttttttagtattgtagttttatcgtagggtgtggtgaaggtttgttatagtttgtcggaagatgtagaaggggagggtttgttgttgattttcggaggtcgggttagcgtgggggttatttcgggtttggtggaagtagtagcggtggttatggttgttcggggggcggggggtagtttgggggcggggggtagtcggggatttttgtttgggggttttttaggtggaaattttttaaagaatattaagtgtattaagtgttcggaagtgttttagggcgtggagaagttggttttttatatgcgggcgtagtattttatttttatgtgttttcgttgtggtaagtagtttaattatagtagtaattttaatcgttatatgaacgtgtatcgtggtgttaagttatattcgtgcggtatttgcggtaagtgttttatatagaagtttattttttacgattattttaatttgtattcgggagcgcggttttatcgttgtttttattgcgacgtgcgtttcgtttataagtttgttattaggcggtattttaaggagtaatacggtaagattacggtcgagaacgtgttggaggttagtgtggtcgagattaacgtttttattcgttagtcgcgtaggcgtggaggttaggaggttggggtttttgggttgcgtggaaaaagggttttttggtttaggagaattggggggtggggggtttggggtagaaaggtaagagtgggaggttgagtagatgtatatattttgagagagggaagatgattttttggagagatttgtttttgagagtgtaagaatttggagttgggaaaagggtttttggaggttaggggaatacggggttttagagaaagattttttttttttagaagtgtatgtatatgtggagggagggaaaagggttttatagaatgagggaagataaaaatgttttatttttggttaaggttgtttaggggaaggttttgatatttttcgagataagaagggttggggggtgggtgggaatagggagggaatttggtaggaggatatgtttttgtttagaatagatttggggtgagggagtggtaaggggaaaagattattgagttttagaaaaggaagtgggagatagtttttgtatgttggggaaatgagattgcgagtatgaggtttgttgaaatttgagggagaataaagtaagacgttaggtaagagaacgtggggtgcgtattttgggtagatattgggaagtgggggtataatagtaagaaataatggatagttatgggggtgggggggatagggtatttagaaaagaaagaatataagaagggttgttgggagggagggagaggagtagagatatatagtattttttaagaaaaaatatattttttaggattttttttggagtttggggttttagtttttttgtttttgttttttataaaataaaaaataaaaaaaaattttttttttttttttatattttggtaattgcgtgtatatgattattttgttttagatagtttttttttgtgatgttgcgtttttaatatttagaggttataattttgtatattttttgtttgaaggagtttagttttaaatatgggagaggagtgtgataagtgagtttttttggttagggatttttttaagtttttatttttagttttttattagttttgtaattttaatatttagttaggtattttatagtataagtgattggtagtcgtggggatgtatatgaattttatttgagggatttaggattagtgttagggatgagttataggtggttaatttgtttacggaaattgtaagtaggagtttgtttggttatattttgtttggggtaaataggttatgtttttaggaaagttaaaaaaaaaaaaaaaaagttaagtttggattaaggtgtagggaaaattataatttttagaaagttttggaatagttaattaaagagaattatagtttttagaaggtttttaattggttttaggtgttttatttgtttgtgttaaatattgcgtgtgaaattatatagattttttttaaattcgattaaaacgtaatatttaaagggatggtattttaaatatagttatcgagattgtttattttggtgtatattatttatatttaaattgttcgttgggttatgatttacggagtatttgattgtgtttatgaagtgttcggtaaaaaaggtttatttattgtagtgttattagttagtaatgacgttcgggtcgttgggtttatttggatttttagtgcgtgtgaaggtgtaatacgtttgatataaatagaagagatatttagttataggtttttagaagggtacgttgttttaggggatatgaagtagtatgttagaattagttaagaataaaggtgtttttcgcgtttttatcgttttttcgtgttcgttagaaagagtaaaaaggcgaggttaaaattgaggttaagttttttatttggtaatttaaaaattagaaaggtagaaaagtaattagaggcgggaaaagtttaattaggttagaggaaatatagtcgttgtcgagagtcgagaagtttagaagtttcgtttgttatttaaaattagatggggatagagacgttatatttgggtttaggcgtgtttcgttttcggtttttgtagaattgaggttaggaatgataggaatttttttttgtagtttttagtttaggatagttatagttattttcgaggtcgtttttaggggaaaatggttaaaaagtatgtagcggtttttttaaggttttttttcgttttttttttttcgtttacgtgattcggggcggtcgcgcgtcggttcggtttttagcgtaagcggcgatggcggcggcggcgggagttgtagcggcggcggtcgtcgaggtgcggaaggggagggggagaggcgggtgtatgttcgcgcgcgcgttcgggggaagcgcgcgttcgtgtaatgtttcgggggtgtaacggggtcggggggttcgggcgggatttgtagtaatttagggggttagtatcgggggcggatgaggggattagggtgtgggaggtggggggagtgggtacggaggcgcgcgtgtagtcgtcggttgtttttgagtgggcgacgggcgtcggggttttaggagtacgcgtgaggggtacgaggggtcgtttatcgggttggggggtagcgggtgttggaggggttggtgttcggggttttcgcggtttgggggataaagggggagcggcgcgtgtagtcgggaggagggggcggggtcggggcgcggaggtttcgttttttttttttttttttttttcggttttagagatgcggggtttatcgagagggagggggttgatgcgggttcgggggaggggtcgtgcggttttttcgggtagtcgaggtcgcggaaggggggggttttatagaggaagaggtaggtttcggagtttattttttttttttagggtttaggtattttggattttttaattttttattgggttgattagtttttttgttttttgtttttttttttagggggaggttttcgttgagatgggggcgttgttgttggagaaggaaattagaggagttatcgagagaggtgagtgtagttaaaacgggttttaattggatcgttattttttttaaatataggattttttgagtttttagttttgaattttttttttttttttatagtttatggttttttgggggatatttttcgtagtgaagaaattttgtttaaggttattttcgattttttggagtttgttggttttttatttttagtttttgttattgttattgttggtgatgagggggttgatatttttgtaggggttatattatttattggggatgaatttgagaattttgagggagatggggattttcgtgggggtcggattttgttgggtgagaggttgggtagtttggggggttggtgggaaatttttgatttttgtttttttttttattttgttttttgtttgtttgttttttaggttatgttataaagttatttttttttttttttagtaaggggggtttttgttttagtcgggttaagatgttaatgataggggcgggaaaattatttttatttgtttagagtttggttatgaggttattgagtatgttaggagtttagggagttgtagtagtagggtttgaattttttttagttattacgagtttagagggatagtttaaggtttatcgagttcgtaaaattatgtttaaattaggaaatggataggtgagtgggatgggagagatgggataattaattataaatttttggtgagtttttttatagttttatttaaggtttttattttatttatttatttatatatttaagtaaggggttgttgtgtgttaaatattaggttgtgtttgatttgtgaattaatagataggtttttttttttttgtagtttatatttttgggtggtgaaagtttgatgttaaagagttaattatatagttaatgttttaattatttttatgataatgataaggtaagggaattttaaattattttttttttttattttaaagtaagtttttggggaatttatttgttattgttttatttgtaaagttttttttgggaattttagtgggaaaggagatgagggttatagaaataatagaggagggaagtgataagggtattagaagttttatgattaagttttagggtttttgggttatatttattgttgatttaaaggaaaaaattgaggtaaatttaatattaagtaaagtatatttggttaggttttgaggatagtttttaggagtaaagatttaagttgtcgtgaaaatatattttgattagtagtagttataagtaggggtttttttgtttgttttgttttgtttttgaagatagttttattatgttgtttaggttggttttaaattgttgggttttagtaatttttttgttttgatttcgtaaagtgttgggattataggtgtaagttattataattagtttataagtaggtttttaaaggaaaagaagattggatgacgtgaagatattgaaaaaaaataggttgattttgggtatattgcgtaggagttagttttgttttggaaggagtcgtaaaaagaaaaaaaaaaagataaaaattttttaaaagattgaagaaataataaaggaaaagaagaggtagtttttaaattgtttattagtttatattagaataataagttattgatttgttatatattgttttttgttttatagatattaggtatatgaagataatgggtgaagtagtattttagttaggtataaaatgtttttaagtagttgtttttaggtatgggttttaatcgttttatgttgatttttcgttgagtttgattaattttgtttgttttatatagtataggttgttatgagttatttttttttttttattatgataaatattaatttttatagttgtaatttattttgtaaagaatagggaagaaaaggaaaattgaatttataaattaggtatagtgagagattaataataataataatataatagcgtaattttaatagtaggttaggcgtggtttgtttataattttaatatttttagaggttaaggtcggtaattatttgaggttaggagttcgagattagtttggtaaatatgtttaaatttcgtttttaattaaaataataataataataataaattagttaggtgtggtggcgtgcgtttgtaattttagttagtcgagaggttgaggtaggagaattatttgtagtgagttaagatcgcgttattgcggtttagtttgggtaatagagcgagatttaaaaaaaatagtataattttaataatatgttattattattgttgatgaattggataagaggggattagtgttacgtaaaatttattatttaaaaaataattttaggttaggcgtagtggtttacgtttgtaattttagtattttggaggtcgaggcgggaggattatttgaggttaggagtttgagattagtttggttaatatagtgaaattttgtttttattaaaaatataaaaattaggttaggcggggtgttttacgtatgtaattttagtattttgggaggttaaggtaggtggattatttgaggttaggagttcgagattagtcggacgaatatggtgaaattttatttttattaaaaatataaaattagtcgggtatggtggtatatgtttgtaatagttcgttatttgggaggttgaggtaggagaatcgtttgaatttaggaggtagaggttgtagttagtcgagattttgttattgtattttagtttggataataagagtaaaattttgttttaaaaaaaaaaataaaataaaaattagtcgggcgtggtggtatgtgtttgtagttttagttatttaggaggtagaggtgagagaaacgtttgaatttgggaggtagaggttgtagtgaattgagattgcgttattgtattttagtttgggtaatagagtgagattttatttaaaaatttaaaaataaaataaaaaatatttttaagtatataatttaatggtattaaatatttttattatgtgtaattattagttattataatttattttgtaaaattgaaattttgtatttattaaaatataattttttattttttttattttttagtttttggtaaggattattgttttttttttttttataaatttgagtaagtattttatttaagtgtaattatatagtatttatttttttgtgattggtttattttatttagtataatgtttttaaggtttatttatgttgtattatgttagaatttttttttttttatttgggtagtatattaagattttatttttaaaagaagtttaaaagaatgttttaaaggttaggtttagtgatttacgtttgtaatttcgtattttttggggaggattatttgatattaggagtttaagattagtttgggtaatatggtaagattttttttttattaaaaaaaaaaattaagaagatattagttaggtattgtgatatgtgtttgtaattttagttttttaggaagttgaggtaggagaatggtttgagtttagttcgaggttgaagtgagttatagttatgttattgtattttattttgggtaatagaatgagattttattttttaaaaaaagtatattttttttttttatggttgaatgttattttattgtgtataaatgttatattttgtttatttatttatttgttagtggtatttgagttgttttcgtattttagttgttgtaaatagttttgttgtgtatatggttatatataaaaggttttttaattttattaagttttgtttttttatttgtaaaatggaaaagggtttgttttgtatggttgtagagatgagtgagtgttagtgtgtttgatattttttttttgaggaaatagtattcgtggttgttagtttgtggttattggagttttatatggtatttggaggtgtggtttattattttattttcgtttggggttttaggttaatttaggtaaaattgtaggtgttttttgatttttagtgtgttttttttcggtttatagttttcggtttttgagaagcggttttttgaaatatagtattttcgtatgagtgatgatgtttatttattgggaaaggtgattttaggttagttttattttttattttcggtggtttgatgtggtttgttttgaaggtttcggtgataggttttatattattttttttttttttttagatttggttaaaaggaggaagttgaatttaggaggtggtttggtaagtagtagaggtagagtttttatttttcgggggttgttttgagggagggttagaggtggggttgtattttatttttagtagaaatgcgtagggtgttagtggttttaatttttttgatttttttttagtcggaggagttaggttttgttcggcgtttaggagaagtgattttgacgaaaggggatttcgggtttttggaggagtgggagacggtggtgggtgatgattttagtttttattatgatttttattttgtggatgagcgcgtggatttcgatagtaaggtgagatagagttggtttgttttttttatcggtgtttttttagggttggggtttattgtttagttttttttgttttttgtttttttgttttttgttttttttattttttgaatatttattaagttattgttttatgttgtttataattttttttttttgtggggggagacggaattttattttgtcgtttaggttggagcgtaatattacgatttgggtttattgtaatttttgtttttagggttaaagtaatttttttgttttagtttttcgagtagttgggattataggtatttgttattacgttcggttaatttttgtatttttagtagagacggggtttttttgtgttggttaggttggtttttaatttttgattttagttgatttatttattttggttttttaaagtgttgggattatagttgtgagttatcgcgtttagttgtaatttatttttaatgtgtattttgttcgttttatttataaaggtggttattattttgtatatgggatttagtatttttttttttttaattagttaatgaaatgattatttaatagatatgtattgtttaaaaaaagaaaataaaaaaagaaatgattagaaagtatttttttaaaatatacgttatgttgtttatataaaatttaaaagtattgtattgttatttatttgtttatttcgttgttttttgtttggttttattttatatgtttgtttatatagtagaatgtttagtttttttgattttgttttttatttaatattttattatgaaaatttgtaagtataattaaaagagtagaatagggagtttttatgtatttaatatatagttttagttattattagtatatagtttattttgatttatttgtatattttttagtatatatatttattaggttattttaaagtaaattttagattttatattattttatttaaatatatatttatatagatttgtaaatataaggtttttttttgtcgtttaatattattatattattgtttttatatttaaaaaaatttatcgattttttaatattattaaatattttgttagtttttatatttttttagtttttataaatggtttttgttaagatttaaatgaggtttatattttgatttgattaatatttgttttaggttagttaggtatagtggtttacgtttgtaattttaatattttgggaggttaaggcgggtagattacgtgaggttgggagttcgagattagtttgattaatatggagaaatttcgtttttattgaaaaaaatataaaattagttggacgtagtggtacgtgtttgtaattttagttattcgggaggttgaggtaggagaatcgtttgaatttgggaggtggaggttgtagtgagttaagatcgtattattgtattttagtttcggtaataagagcgaaatttcgttttaaaaaaaaaaaaatttttttttgttttaggttttttttagtatttaggtttttttattttttttgtgtttgtttgtttgtttgtttttgttttttgagatggagttttatattgttatttaggttggagtgtagtggcgtgattttggtttattgtaagttttattttttgagtttaagtaatttttttgttttagttttttaagtagttgggattataggtatttattattatgtttagttaattttttgtatttttagtagaggtagggttttattatgttggttaggttggttttaaatttttgatttcgtgatttgtttatttcggttttttaaagcgttgggattataggcgtgagttattatatttggtttgatttttttattttttaaaaaaaaattttttggtttaggcgtggtggtttacgtttgtaattttagtattttgggaggtaggtggattatttgaggttaggagtttgagattagtttagttaatatggtgaaaatatatttttaataaaaatacgaaaattagttgggtgtggtggcgggtgtttataattttagttatttaggaggttgaggtaagagaattgtttgaatttaggaggtggaggttgtagtgagttgagattatattattgtaatgtagtttgggtaataagagtaaaatttaataaataaataagaaagattttttttttttgttatttatttgttaaagaaattagtttagttgttttatagaattttttatatttaggagttggttgattgggtggagattgatatattttttttgtttatattttttgtaaattgatagatttagaggcggaattagttttaggtgttaagaagatttgatagtgggtgtaagtgtttttggttatattatattaggatgtatggaatatttaatttggttattttttttgttagtgataagattgattagtgggtttaggtgatgttagtttgaattttttatataaagttttttatgagttttgtgtttagtgtttttagtaattattggtggttttgtttgtttatgaatattataaaaggggtattaaagtatgtttattttttggtatttgttttttgttttttaatttaatattatattattaagatttgtgtatattgttgtttgtaatttttttattgttgtgtaatattttatgtattttttttttatgtggttttttgttttttttgttatttatatttatttttagtagttattcgtgggtagtggcggggggtaatggtggtggtggttttttttatttattttattgtttgagttttgggggttggatatgtttgttttgttttttttttagtttgaagttgaagttttaattgaataattaagtgaagaggaggaggaggaagaggaggaagaagaagaagaggaagaggaggaggaagaggaagaagaagaggaagatgaggagttagggaattagttagatagggtaagagacggaggttgatatttttagaggagtgggagattatggggttggaggtttggttttgaaggtgttgggggggtttttgggggtgagggtttttaatttttttttttttttttttttagagtggttttagtggtcggcgtaaggttaagaagaaatggcgaaaagatagtttatgggtgaagtcgtttcggaaacggcgtaagcgggagttttcgcgggttaaggagttacgaggtgaggaggttttgttgtttttgggtgttttttagttttcgttcggttttttagagtgtgtgtacgtatatatacgttttcgtatgtttatttgtatgtatttacgcgtttaggtatttgtgagttcgtatttttattttttttgtttttgtgttaggagtgaatggtgtgggttttttaggttttagtgagtatatggaggtttttttggggtttttggagttgtttagcgaggggatttttttttttaattacgttggtaattgttaattgtcgggatagggagttattagggggcgattttagggtaggagggaaagggaaggaggggaattacgttagagtcggggtgtttatggttaggttttaggggttttggggtatggcggggtggggtagggagggagtgagaggattcgttaggggttttagtaggtgaggtgtagagttttttttagtttttttttttttttatttaaggggtgtttaatgatatattttcgttggagatagagcgagggtttgaggagttgtttttgtgtagttgtcgtatggaggtatttaagattgatcgtattagcgagagggcggggtataagtgtatggttattgagagtgtggacggagaggtggggtcgtgggttggtgggagaggtgttagggcgtttagttttcggttttagttttacgttttttttttatttatttttattgcgtatagttgttaggttgtaatgtcgttatttttaagcgggagattatgaggttatttagtcgtgtggttttgatggtgttttgtgagatttatcgcgttcgtatggttaaatattattgttgttcgggttgcggttatttttgtacggcggtgagtgattagtggggtagataggtagtatgttttgtggtagagggggttttagtaatttgattatgttgtttttttgtttttagggtatttttttggagtgttattttgattttcgtgtggtttatcgtttttataaggtttgtgtgttttagttgaatgggatggttttttgtttttattgtggggaggatgtttttgaagtttaagaggtgattatttttcggggtgacggggtgattttatcggtcggtattgtagtttttgtatttttatttttgttttaggatgttttcgggagagtagatattttttagtttaggtattggttttttttttttgtattgtttgtttttttttttatttttattgtttttggatatgagtttttttttttatagtgttcggatgcgagggtatggggaatttcggcgttcgttttgcgattttttggttgatattattgatagtttagggttttttttgattttgtttaatgggggttgttttttagtcgtggggttgttattggggttaggtcgggaggttttggaaaaggttttggttatttaggagttagagaggtgagtggggagttgtttaggtatagtaattggggttgaggttagaggagtggtgtcgaggttgatgttggaatttgaggagtttttttttttttttcgttttcgtgtttttttggtaggcggaagaagtttcgtttttattttcggtagttgtatttgttcgtgaagtagggcgagttgtagaaggtgattttgatgttgtgtgagtgttatttatttttttagtagattttgattaagttttatgtatatattaggtattgggtatagggttaggagtatagtcgtgaaggatatagtttttgttttgaaggatttagtgtggtggggaaaagatatatgtaatttataacgatggggatgtggtgatttataggtgttgggttttgttttgagtgtttatatttgttagttttggtttgtatagagaggttagggattttgtatagtgtatagtggtattgagaagtaaggtagggtttgaatttaggtagagttgatgtttttgattttttattttgataaatgttgtggtggaggtaagttcggagaatgttaggaggggttttgatttagtttggggttttgagaagtttttttgaaagaagtgttatttgttttttagtttgtttattatttgtttttttttttttcggtgtggcgggtttttttcgtagtggataatttggattttaatttttagagcgattagtagagtaagcgtacgtttttgtatgtagtcgtttagaagggtttcgtggagatttgttatgtgttgttgtaggttagtacgggttcggttttatgttttatttattaggtttttaggttttttttttgttttatgtttttttggtgttagtttttttgtttttttataggttggagttaatataaatgtagtggataaatagtagcggacgttattgatggaggtcgtggtgaataattatttggaggtagttcgttatatggtgtagcgtggtggttgtgtttatagtaaggtgtgcgcgtaggtagtagggcgtggttttcggagttagggattaggtttggggtgttagtttaaaggtttatttgttcgtgttttttttaggaggaggacggttttatttgtttttattacgtagttaaaatcgggaatttggagatggttagtttgttgttgagtataggataggtggacgttaatgtttaggttagcggtttatttagtttagtttttttgggtttttggtgtttgggttttttggtttggttttaggttttgggtcgttttttttatatttgattttatattgttcgtgtttgtttttattgttttttttttttttatttgtatttttttttatttttttttttttcgtttttttttttttattaagttttagaataattagtttttgttttaatttttgaaagtgtttagtgaggttttttattaatttttgggttgttatatattggatgtgttttagttatttattggtattttttttagtttttgaattattttattattgtttagaagaagtttttttaagaggtttttgtggttgtgatatgatttagtggtttagtggtttttgagagttttttgattttttagtatattttttgtttttaatttagaatttattatttttttaagaaattttgttttttttatgggaaatttttttttttttttttgagacggagttttattttgttgtttaggttggagtgtaatggcgtgattatagtttattgtaagtttcgttttttaggtttacgttatttttttgttttagtttttcgagtagttgggattataggcgtttattattatgttcggttaatttttgtatttttagtagagacggggttttattatattggttaggttgattttgaatttttgatttcgtgagttatagcgttcggttagaagtattttttagagaatataatttatgtttttaggagtgtttattgttattgggttgtcgttgtttttaggatttttgagtgggtagatttaggaaatttttgttcgtttttttttttaagagatagggttttgttatgttatttaggttgaagtatagtagtagtttatagatagttatagttttttgtagtttcgaaattttgggtttaagtaatttttttattttagttatatgagtagttgggattataggtatgtatttttatgattagtttttggttgtattttttggaaagagaataattattttattttttttttggtattagatggtagacgttattagttttatttttgtttgtttgttttttgagacggagttttgttttgtcgtttaggttggagtgtagtggtacgattttggtttattgtaagtttcgtttttcgggtttacgttattttgttttagtttttttagtagttgggattataggcgtttgttattacgtttagttaattttttttattttttagtagagatagggttttatcgtgttggttataatggtttttattttttgatttcgtgattcgttcgtttcggttttttaaagtgttgggattataggtatgagttatcgcgttcgattttattagttttattttttagatgaagaaattgcgatttagagacgttaagtgatttatttagggttttatagtttgtgaatggtggagttgggatttatatatatagttaattttgattatttgttgttttggtgagtagggttagttgtttttatttttattttttttttatttataggatagtggggggtggacgtttattatttgggttgtagagtataagtatatcgaggtgattcgtatgttattgacgcggggcgtcgacgttatttttattgataacgtgagtgagcgtttggttgaggtagggtagttttaggtttttgagtaaggtggaggttggatttaagggtttagttgtttgtattttatttgttttttttttatttttataggaggagaatatttgtttgtattgggttttttttacgggtagcgtcgttatcgtcgaagtttttttgaatgcgcgttgtgatttttatgttgttaattattatggggatatttttttgtatatcgtagttcgggagagttattatgattgcgtgttgtgagtttttgtttcgtttttgatgtttttgtttttattttttgtagttttagattttgtattgggtattttgttttttttttaggttatttttgttacgtggggttaattttgagttgcggaataaagagggggatatagtatgggatttgattttcgagcgtttcgacgtgtggtttgcgttttaatttaatcgtaagtttcgatttggggtgggaaatcgggttattcgtatagagaagattatttgtcggtgagttttgggtttttttttgtatttaagattattttttttttatttatattttttttaggttttattgtatttttataatattttttaatttttttttatgtattattgaatttttagaattatttataggttttttttttattagggttgttagatatagtaaataaaaatagaagatatttagttaaattggaattttagatgtatagatgtatatttttttagtgtgagaatgttttgtgtaatttttgggatatattaaaaagttattttttgtttatttaaaattttatgttaattcgttgttttgtattttatttggtaattttatttttttgtttttagttttaggaatttttttaatttttttttttatatttggagtagttttttatttttttttttagttttttagtttttttttttcgttttttgtagggacgtggttcggggttatgagaacgtgtttattttttgtgttaacggtgtggatggggagttttgttttgaggattataagtatattttagagaattgcgagacgtttattatgaatatcgatcgtaatattatttatttgtaggtgagtagggggttcggggtttttttaaaaggatatcgagagttgttaagtatagttggataagttttaaattagtaaaggtatttggttaaggaagggttggttgaaagggagttttggtgtggggtcgtatttttattaggggagggattttttttttaggttatagtaaggtattatatgagtttttagtagttttggggatattattatattgattattcgttattttaggattattattatttattgttgtaatatatggattttaaagaaaggatagtggttagggggttagggggtattaagagtagaggggtttagatcgattatggggttgagttgatttttgttttttcgttttagtattgtacgtgtgtggacgattgttttagttttaattgtttgtgcggttagtttagtattcggtgttggtatgataaggtgcgtgttttttgttttggttatagatattcggttttttttttagaggagttagtttttaataaattagttttttgggattatgttttttattttttattttgtgggggaagtgattgagaggattgggtaaggtttgggaattttgggatgtggttgggatagcgatgggcgtgtgtttaggtttatgtaaattagggatgatgtttttgtatttcgtgttttcggattttagagtttgtgtgatttttttaattttaatttttttgtttttgtagagttttggggtttttgggtgggtagttgaggtgggttttatagagaaattattattttttttttcgtattttaggatgggcgattgttttaggaatttaataagattgagttttcgttgattttcgagtgtaattaggcgtgtttatgttggagaaattgtaagaatcgggtcgtatagagtggtattaagtgaggttttgttttatagtttattttttttttattttatttttttttttttgtttttggggtttttttagggtttttatttaatagcgttattttttttatttttagggtgcggttatagttttatcgaatagttaagatgggttggggggttcgcgttttgtagattattttataggggatttttatttgcgagtaagttatcgggagtattttaatatttggtgggaaggggatatatggttattgttgattgttaggttttttttttagttatttgttttgatgagttatatgtttttatttggttattttttagttagttttttttgatttttgtttttgtagttgagtagttagtcgtttttgatttttatttttttagttgagaatggtatttgtttttattttgtttagattatagagtttgtttttttttttttttatttttattttttatttttttttttatttttttttcgttttttttagttggagaaagtgttagtttgggagataaatagatttgggtttgagtttttttttgtttttggatgtttttggttaagttatttaatttttttgagttttattttttttgtttgtagagtggaggtgataatagttatttatttgtttatttttttaggggtttgtttttttttattagttttttttttgtttagtatttgtaattttttttttttttttggttgttattttataatttttaattttattttagttttttttggtttttttttttttttttttttaatttattttttgagacggagttttatttttgttgtttaagttggagtgtaatggtataattttggtttattgtagtttttattttttaggtttaagcgatttttttgttttagttttttaagtagttgggattataggtgcgtattattatattcggttaattttttgtatttttagtagaaacggagttttattatgttagttaggttggtttttaatttttgattttagatgattcgtttatttcggttttttaaagtgttgggattataggcgtgagttatcgtgtttgattattttttggtttttaaaaaagatagttttttaattatatttgtttgtttaatagattatttagtttttttttattatgttattttttaatttttttggtaagtagtttttttttgttgggttttagtttttttattatttatttattgtttgtttttgttaaaatcggtttttgttttttttattttgttgaagttgttttttgatagttattttttatttacgtttttttcgtgtgtttgaattttttatgtttgtttattttttttagatagttggttttttttttttttttggtgtttagatatgtgtgggtgtttttgtttcgaattatgttttgagttttttgttatttttgtatttttggttttttttgtagttttggttttttttttgttttatatcgtttatttttgtcgggtggtttttggaatataaatttttttgtgtttaaattcgaatttttttatttaggttaattgtttttatatattaatttttttaattatagagtttgttgtttgtttttgtgttgattgaaggttttttttgttaaggttggaatgttgtttttttatttgtttattattgttgttttaggtttttttttttttatatttgttagttttgtttattttagattttataggtttgtgaagagagatggggtttggagttattttttaatagtttatatttatttttagaattatggatttttgttttataggtatgtcggggagttgatttttgatgttgaggttgatgtgagagaggatgatttttattttttcgatttagataataaggtgagtaggagattttttttattttgttgttttttagggttggtttttaggagtttttgggaagttagtaaatggaaatttggggaggagggattggggagttagtgggtggggagggtaagtagggtcgggggagatgtgaagagtgttatttttttgttttaggatggagaggtgtattgtatagatgttcgttattatggtaatattagtcgttttattaattatttgtgtgattttaatattattttcgttcgggtttttatgttgtattaagatttgcgatttttacgtatcgttttttttagttttcgagatattcggattggggaggagttagggtgagattttaggggtttttaggggttttgttagggggtgggagatgtagtaaatttgggatttgaaggttggtatgtatttggtgtttaggtatggagtagtgtagagttttttagattttagtgtatataagtattttttggaggatttggggaaatagttttgtgttttttagagagattttgaattagtaggtttgggatggggtttaggattttgtatttttaataagtttttaggtaatgttgatgttgaaagtttatagaatatataaggggtttagattttatttggagaagataggttgggtgtcgggttttttttagggagtaggatttatagggttttcggggtgggtttttggtggttgggtttaggttttataagtttttgtttttttttgataggtttgattatggcgatcgtttttgggatattaaaagtaaatattttatttgttaatgtggttttgagaagtgtaagtatttagtcgaagttattgttttggagtagagtcgtttggttcgtttggatttatattttgagttgttgttcgagttcggttttttgttttttgttaatatatgagaacggattatattttttttttttagtatggatggttatagtttagtcgttttttttgttattagttgttcgtagtttatgtttgggggtgttgttattttttttttttattatttttttatatatttttgattagagattttagttaggttttggaggtttgatagttttttttttttagagttggtttttttttgggagggtaattttagggttggttatttttcgtgttttttatttttagttgaagtttgatgaattgaagtcgggtttttatgttaattggttttttttgtttttaataaatgttgggtttggtaataaattgcgatttttgtgttggggtggggagaaagtatatttggttagagggaatgtgggtttaagggttagaataggatgggaagtaggttggataggtgtggttggtgtgatggtcgtttagtgcggggtagggaggtggggggttattatgaagatttagttttataggtacggtggttgatatttataattttagtattttgggaggttaaggtaggcgaattatttgagattaggagtttaagattagtttggttaatttggtgaaattttattttttaaaatagaaaaaatttgttgggcgtggtggtaggtatttgtaattttggttattttagaggttgaggtaggagaatcgtttgaagttaggaggcggaggttgtagtgagttaagattgagttattgtatattagtttgggtaataagagcgaaattttattttaaaaaggaaaaaataggtttaatttttatattttaatttttggcgggagcgtgttgggagtgtacggtagttaaggtagtttgcgagattataaagcgtttttttattagagtatgttaggtcgtttattgtggttcgtagtgtttttaggaaatagttttgagttttcgttttaggttttagttttttagttcgttgggtataaagttgagaagaaggaattagagtgtgtcggggattataggcgggggtggggttgtgacgtgtgggagggcggggcgggtagtaggtgagacgttaggtttttagggttttaattatttcggagattgagttatggggggaaagtagcgggacgaggatgacgaggtttacggtgagattggggcgaggttcgggattttgtggagggaggggaggacgggtattttgggaatggtgtttggggttggttttagggagaggaattaaggagagtattgtgtttttgaggggagggttcgggaatcgggagttatggagggagggagttagggttttgggaggaggatggggttcgggggttggggttgttgttggggagtttatggggagtgaagttgggtgtttttgaagagttggggttgaggtttttgggaggaggggggtattttaggtttggattttgggtttttaagggtagggttttaggaaataaagtcgagatggaaggtggtaggttggggttttgagtagaatagggttggatgttgggagtgttttgtgttgtagagtttgtaattagtgaggttagggtttttgtaaggaggaggaggtttagtttggagtttgggtttttgagggcgaaagttgtttgtggtttgtcggtttttttgaggagtgaggggattttgagtgggttggtttttgtttgttagggtttttgggagaagtggtagagggagtgggttttgttgggggtttttgtgaggagttggggttgagggtttttgtggaaagggggttggggttttgtttaggggtttttgtgaggagttaggagtaggagttggttttggggtattttgaggaatagggatagggtttttggggtttttgtgaagggtgaggtttgaggggagaaatagtagggagtttgtttttagaatttgtaaggaaaaggggttggggttttgaggagagagggagttggggattggtttttagatttttacgagtagtgaaggttggggatttatttgcggaggtttttttggttttttggtttgaaggggaaggaatttttatgagggattttttcgaggagaggtttgagttttttagggttataggggagtaggtagtgaggattttcgagtagattttttggagcggttttaggttaattattgtttatgagttatggagggatagagtttagcgtatttggggaaagtggattttattcgtttttttttagatttttgtttagttttcggttttttttttttagtgtttataaggaattttgattgtttagttttttttttttttgtgtgtgtatttagggaggattaggaatttaacgtgtttgtaatttttatggttgggtttaggtgttattttgattgttggtttagagttcggagtatattgtggttaggggattgaggttttattagagtgaggatgtatagggtcgtttttttttttaggttttgttggggttgatatttttgtttttagtttttttttttatagttttgaattagagggtaaggtagggtttggggtagataggggaagaggttatgatttttttgaggggttgtgggtttgtgtggtttttggggagggattagggaggaggtagggatgagaatgagggagtgagagttattgggagttttatattttagttaaagggagatttaggagaatcgtgttagggtagggtaggggattaaggttattttttagattgattgttttgagatgtgagtcggaaattataaaggtttttttttttttttttatggtagtttgggtggagtttttagggagttgttgagttgttgattaggtttggattttattttttttgttttttagttttttttttttgttagttttgttttagtttatttttttttaaatatttgaggtttgggtaggattttggggttaggaggatttagtaggataagatatgtagagagagatttattttttatatttttttttatgttttttagggaagttagttaaatacgattttttttttcgaggttttattaagaataggtgagttttgggtattgtttcgggggttggcgggggtggtgggtgtagtgtggaatttagtatttgttttgtatttgttaaaatattagtaggaaatttgtgaaaaagagaaatttttgttttagatgggtggtgttttggggggattgttgtgtttggagtaggtatcgagggttttttagttttggggggatgttttgttttttgatttaagtgtcggttttataagcgagagaatttatttagttgagtttttgcgagttgtgtgtttttttgttttttattttagaagaaagtttatttatttagaaaaaggttttttttttttttgtgttttggagatgggggtttattgtaggttcgaatttttgtgtttaagtgatttttttgttttagtttttcgagtagttgggattataggtatgtattattatattaggttaatttttttgagatgggattttattatgttgtttaggttggttttaaatttttggttttaagggattgttttgttttagttttttaagtagttagtattatagtcgtgagttattgtgtttggttaggttttttaaataaaatatttaaaaaaaattagtcgggtagtagtggtacgcgtttgtaattttagttattcgggaggttaaggtaggagaattgtttgaatttaggaggtagaggttgtagtgagttaagattgtattattgtattttagtttgtgtgatagagtgagattttgttttaaaataaaaaagtaaaagtaataaaaaaataaaaataaagtttattgatgtttatgttgtagtattatttaattttttaatttttaatttttttagattataagttttatttttttaagtttttttagtttagtttttcgtttcgttttttttttagaagttgtatagatgttatttgttgcgttttttttttgttttttattttaggttatatcgtggtggggattgtgggtgagtttttagttgtttagagttagggtagtgggtgagggataggaatttagggagggattatttttataattgttttattaagtttttgttttttaatgatttatttgtgtttttgtttgtagtttggttgtatggagattttcggtaagttttttattttaggaattttattggggtttattgtggtatgggggagaataagtgagtataaaggcgagaagaggagtgtaggagcgaggcgaggtagggtgggtaggagatatttttttaatttaggttttagatttgttcgtgtttttttatagtttttttttgttgtttttattttattttagtttttttgaatttgataattttaggttacgttaagaattattgttggatagttagttttttgagtttttttagaaatgggaggtagtggagagtcgtgttaagtgtatgagttttatagtttagagattggtgtttggatttttaattggattaagttttggttgtgtggttttggataagttatttaagttttttgagttttgatttttttatttgaaatttaaggggaattttagaagtaatgttaatagtttttatatatagatgtttaataaataataaaattttaaatatttatatagtatttattatgttttaggtaggtagtaaattttatatatataagcgtattgaaattttatgaggtaggtattattgttttatatggagtagaattaagatcgagaataggtgatttgtttaagattataaagatgatatgaagttgtggagttttaagtttatgttttgagttatttgttagttgttgtaatggtgatttattttgagagattttttaggtatttttttatttttttagttgagttagggttaggagttgggaggtgattggtatgggttacgttgggttgggtttattgtatttttgagaagttattttagtggtttttttttttttttaatatttgattaggttttgatgtatatggtttttttttttttatagagataagtcgtattttttgtattttaatatttttagttgtattttgtttagtaatattattttagttgttgagaacggtttatagtgttttatattttaggttagagtttgggatttgtttttattttagattttatttagggttttaggttttagttttttagtgttttttttgtatttaggtgtgtgtgtttttttgttcggaggatttatggattgtgggaaaaaacgagtttttatagattgttggggaagttttttatataaaaaataggaatttttgtttgttaggggtattttggaatatggtgaatattgtttttaattttattattgtcgtttagaagggttagggtgggtacgagagggagggggagttgggtagattattattaggttggtttttttggggagtgtgggataggttgagttttatggtggtggtgaggggatttgtttttttattttgttttgtgtttgtgtgtttgtttttttatttttgttatagacggtgattataagtttgtaataggaattttgttttagttttttttttttttttgttttaggtgagaagtatagattttttttttagacgttatttagtttagtgtttttattgtttgaatgaagaaattaggtttagagagagtgaagttatatagtttgttggtggtaaaattggaattagtattaggtttttattttgttttttgttatgtggttttgtagttagattattagtgttttggggatttattatgtgttaggtgttggggatagaggtagggataataattgttttttgttttagttatattttaggtgaagagattagagttgtttataaagagattgtatgaaaattttatgaaaatatatatgggtgaatttatatatatattttttttttttagacggagtttttttttgttgtttaggttggagtgtagtggcgtgatttcggtttattgtaattttcgtttttcgggtttaagcgtttttttgttttagtttttcgagtagttggaattatagtatatggtgttcgttattacgttcggttaatttttatttttattttatttattaaatttatttattaaatttgtatttttagtagagacggggttttattattttggttaagttggttttgaatttttaatttcgtgatttatttattttggttttttaaagtgttgggattatagatatgagttattacgtttagtttgtatatatattatttttatatatgtatagggaaaaggttagaaggatatttgtttaaatgttataagtgaacgtggttgggtggtaggattatagttgaatttttttttttttatagtgtgtttttttttttagtagtaaatgtttttttttttttttaagagatgaagttttgttatgttgtttaggttggttttgaatttttcgatttaagtaatttttttattttagttttttaaagtgttgggattatagatatgagtttcgatatttagttgtaaatgttatttttaatataaaataatttttaggttaggtatggtggtttatgtttgtaattttagtattttgggaggttgaggtaggtagattatttgagattaggagttcgagattagtttggttaatatggcgaaattttatttttattaaaaatataaaatttagttgggcgtggtggtatgtattttttattttagttatttaggaggttgaggtaggagaattgtttgaattcgggtggtagaggttgtagtgagttttgtagtgagttaagatcgcgttattgtattttagttttgttgatagagcgagatttcgttttaaataaaaattttaggtcgggagtagtggtttatatttgtaattttagtattttgggaggtcgaggcgggcggattataaggttaggagttcgagattagtttggttaatatggtgaaatttcgtttttattaaaaatataaaaattagttaggtgtggtggtgggtatttaaaattttagttattcgggaggttgaagtaggagaattgtttgagtttagaggcggagtttacggtgagtcgagatggtgttattgtattttagtttgggtaatagtgagattttattttaaaaaaaaaaaattagataatttatagtataagatgagatatttagttattaatttaagtatagtaaggagtattttaagtgaatattttaaagttaagtagatttgaatataaattttagtattttttagttttatggttttgatttaattatgtaatttttttgaattttgtttttttatttttagaatgtaaatgatagtgaggtgtagtggtttacgtttgtagttttaattgtttaggaggttaaggcgggagggttatttgagttttggagttggaggttatagtgagttatgattgtgttattgtattttagtttgggtaatagagtgagaaattttgtttttaaaaaataaataagttaggtgaggtgatttatatttgtaattttaatattttggggggttgaggtgggaggattgtttgagtttaggagtttgaggttagtttgggtaatatagtaaaattttatttgtataaaaaatttaaaaattagttaagtgtggtggtgtatatttatagttttagttgtttgggaggttaagtggggaggatcgtttgagtttagaagtttaatgttgtagtaagttatgattatgtagttgtattttagtttgggtgatagagtaagattttgatttaaaaataagtaaataaataaataaatagataaataaatgataaagtaaggttgtttggtaaagttgttgtaaggatggtagtaagtggttttgtaggtatataatagttgttaaaggaggtggggataaggttagaaggttttttggaggaggtgagatggagttggatttgaatagggagttatggatgggatttttggtggaaagagagttttgagagagaggtatagtaagagtaaaggtatagattagaagggaatatgggttggatttggataggagagtttggaagtttggttagggagtgtggatgttgtttttggggtagagtttttggagatgtttgagttataaagggatttagaattttggagtgatgaagtttaggtagtgttacggtttttttggtattttattcgggtggagggtggatggaagggtgatagggtgttttaagagttgaggttagcggagaggagggtttaaattaaggtacgatagggaggggaggtaggggatagattgggttttataggatagaagtttatttgtgaaattaaaagtagtttattgagggatgtaaggtttattattttttttttttttaagggtattgtggattgggagggggttagagattttttaggtagagtttttggtttttaatttagtagttcggtttttttttttagttttgggacgttgttttttatggattaatattattttatcggcgtttttagggattattaatgatattattatatagtaggggattaggtaggtattttttttttttatattttggttatattttttttatttatagttttatttgattttgtttttttaatagcggttttattgatagttttaatgttcgagatattagtgttaagatttttgaagattttgtttagttttggtattggatttttgtgtgagttattagatttttttttttttgtgtttttgttttttttttttttgattttttattttttcgtttaatgtttgaaatataggttttggatagaggaggaggagttagagtttcgaatggattttaagattaataggatttataagggaaagaggtttaatttggggatattgggtggtgtgtggaaaggtagggagggtttttgtaaggggaaagatttgaggggttagggttgaattttattgtttttattttgtttatagtgttttgggggtggttttggttttgagtttattgtttattttgtttttgcgtttggtggttgggtttttggtgttggtgttgattttgggagtgttgggcgtgttggtatatggtatttattattgttgggaggagtatcgagtgttgcgggataagggcgtttttattttttagttgggttttattattaattttagtgtttattagagcgtgtaggagatttggttggtcgttcgtgagtgttttgtttatttttaagttattagttgtttaaggattgttttgggttatgttcggttttagttttggttttgatttaggtttgtttgttttattttttgtagtgatcgtgttggcggtgtttgaagttattttgttgttggtgtttatttttttgcggtagcggattcgtattgttatcgtttttttgaaggaggttagtaagttagggtttgtttgggagggagatggggttgaggatagcgtggatttaggagtgttaggggatttagggggtgttagagaggtggtagggagttttagaggagaagggaggaatatagtatagtggtgaatattgttgtggttttgtttttttatttgtaaaatgggggtaataataatttttgttttttagggttgttttgaggatttaatgagtgtttggaatatgatataggttttttagaggggttggtgggagtggtggtggttgagtggaacggtaggaattcgggttaggaggggtagtagtttgttttcgattaggaattgttatatatatttgttaagggattacgtttgggggtgatttttttttattttattcgaagttgttttaggtggtttttttgtgattttagttttttttaagggttttgtgagtttgatttatttagttttgtttatttagtgagtatttatagtatgtttagttttgtattaggttttgaggatatagatatgaaagataatgttattaattttgttggttttattttgggggagtggggtaggttttagtgagggtagcggggttagtttttttttttttttttttgagacggagtttcgttttgtcgtttaggttggagtgtagtggtgcgatgttagtttattgtaaatttcgttttttgggtttacgttatttttttgttttagttttcggagtagttggtattataggcgttcgttattatgttcggttaattttttgtatttttagtagagatggggttttatcgtgttagttagtatggtttcgattttttgatttcgtgattcgttcgttttagttttttaaagtgttgggattataggcgtgagttatcgcgttcggtcggggttagttttttgagaagatggatagttggggcggtgtcggttaatagttttgtttttttgtagggttgtgggatagatgatgtttattatgttttatttattggttatttttgtttttttttttatttgtattgtttattgggttatgattgttttgtattttttgtttacgtagttagttatttttggagttttgggggttgatggaaaataaagtaatatttgttttgtagagtgttttggtgttattggaagaggtgtttttttttttgggtagatatattagtattgtgtttgaatagagttgaaagggtgtatataggttgaattttagttttttttgtgtagtaaacgatttgtataagtatttaggaataggtttttaaggagcgagtgatttgtggagatttcgtgtgattatgttttttttgatttttttttgggtatttggttatatcggggtaattttagtatgtgttttgggtatttaatattagttttttcggttgtgagaaagtgttaataaatatattatgtaattttacggtaagaggaagtaggggatatggaggcgggattagtaggggtgaggggttgtaggggttatattttttattgtgtagagaagattgaggttatagagggtaagatatttgtgtaaggttatatatttaatttttagtagagttagaagaaattagtttttagaatatttggtatttttgttgagttatttattatgtggggagggaaattgaggttgggagagatagttttggatattaggatttattttatttttttttaggatattgttttgatttgaggattattaattattttattttttgagttttagtttatttttgtttgtttgtttgtttgtttgtttgtttgttttgagatagggttttgttttgttgtttaggttggagtgtagtagtgtaattttagtttattgtaatttttattttttaggtttaagtaatttttttattttagttttttgagtagttggaattattagcgtatgatattacgttaggttaattttaagttttttgtagaggtaaggttttgttgtgttattcgggttggttttgaatttttggggttgtttcgatgtagttaggtatttaagtaattttttggtttaattttttaaagtattgggattataggagtgagttattatatgtagttttatttttttgtaaaatgaggataattataatatttatttttggggtggttgagaagatgaaatgattttgggtatataaagtgtttagtataatgtttggtatttgataagagtttaataataggttgaattgtattatattgttaagttttatttttttggaatatagagttttaggtagtagttaggtgggattttttgcgggggattcgagagagaagttgtttttaaaatttttttgtgaggtttttcgggagtggcgttgggttgttgggaatttattttttttaaatttgttatatttttatttcgtttgagttgggaatatgagttgtgttgtaggtattagttttatttttattaaaaaggggaggtttggtaggcgcggtggtttatgtttgtaattttagtatttaggaggtcgaggtgggtagattatttgaggttaggagtttgagattagtttggttaatatgataaaaatttgtttttattaaaagtataaaaattagttaggtatggtagtaggtgtttgtaattttagttatttaggaggttgaggtaggagaattgtttgaattcgggaggcggaggttgtagtgagttgagatcgcgttattgtattgtagtttgggcggcgagatttcgttttaaaaaaaaaaaaaaaaaggtttatttatatgtatagaggatttattatgtgttaggtattgggtatataaagtttaaaatgatgtggttttttttttttttttttttttttttttttttaatgaaaaaaaggttgttatataggttggagtgtagtgatgcgattatggtttattgaagttttgattttttaggtttaagtgatttttttattttagttttttaagtagttgggattataaataagtgttattatgttcggttaatttttttttttaagagatggcgttttattatgttgtttaggttggttttaaataaatgggtttaagtaatttgtttgttttagtttttaaaagtgttgggattatatatatgagtaattgtgttgggtatgacgtgagtgttgtttttaatttgtttgtgatttagtagtaaagattgatagaaggtcgcgcgtagtggtttatatttgtaattttagtattttgggaggtcgaggtaggtgaattatgaggtttagagttcgagattaatttggttaatatggtgatagagtgagattttattttaaaaaaaaaaaaaagattttttgattagttaggtatggtggtatatatttgtagttttagttatttgggaggttgaagtaggaggattgtttgaatacgggaggtagaggttgtagtgagttgagattgagttattgtattttagtttgggtaatagagcgagattttgtgttaaaaaaaaatttttttggttatatttgttagaaagggttgttttttaatttgtgattttttattttttattatgggaatttttaaatatatgtaaaagtagagatgatagtatagtgagttttttgtatttagattttataatttttaattttttgttatttttattttatttatatttttatttataattttttttttttttgagatggagttttgtttttgttttttaggttggagtgtagtggcgcgatttcggtttattgtaatttttgttttttgggtttaagtaattattttgttttagttttttgaatagttgggataataggcgtttgttattacgttcggttaattttttgtatttttagtagagatgggattttattatgttggttaagttagttttgaatttttgattttaggcgattcgtttatttcggttttttaaagtgttgagattataggtataagttattgtattcgttttataaatttttttttttggagatttttaaggtaaattttggatattatgttattttatttgtatatgtattgagatggattttaatagataagaattgtttaaaagtatagttattatattattattatattttataaaattaataataattttttaatattattaaatatttagtttgtttaatttgtcggaaagggttttggtagacgttgtagaggttgttttggaatgggaatgttgagtgagtgtttttttttttgattgagattgagggagttgattatgtttatgttataggtagattaaattgagtttgagtttggagatggaatttttcgatagaatttgattttcgtagtttagagaagttattttttatttgttaattttgggaggggtaggagttattgggaatgggacgtttaggttttatattgaggttttcgatgtttgagtttattttattttcgtttatttttttaggtttattttgtgaatttttcgtgtttagggttgatgtgcgttttttagggttatttatttaaaggtttaatttaacgttttgtttttaatttgtaaatttatggggttttggggtttttttggatttttaattgggtattggttttgggttaatgcgttttcgttggagtttttgtttttttttattgggttttttataagttttaggatatttttattttttttttaatttttgtttttattcgtatatttcggtaaggatggggtaggggtttggttattgtaggtacgggggttttaggggttttggagttgtttttgattgtataatattttttgtagttattatattgggttattggtatttggagtttttattttgatttttgtgtagatagttcgggttattttggagtatattgattataagtttagaggtgagtttggagtcggagtaggagttaggagttggggaaggttattagggaggggtagtgattaaatatgagtttttttcgtttttaggagtgtagaattttgtagttcgttgtattatgtgttgttttaagtgttgtttttggtgtttggaaaaatttattaagtttttaaatcgtaatgtatatattatggtgagttatattgtaagtaattttttgttttggtgttttttggtttagatatttttattttggtttaggtagttcgttttggtaattttgatttttttattttttttagatcgttatttacgggaagaatttttgtgttttagttaaaaatgcgtttatgttatttatgcgaaatattgttaggttaggttgtttttttttcgttttgtggtttttttttttgattttttatttaaggttggtttcgtgggtgtgttgtgtttagtcgggttttagatttagtttagtgttttgtttttgttattttgaaacgtgaataatttttattttgtattagtttttataaattacgaagttaattttatttttagtattgttaggttttttatttttaatttgttttaatttttggtatagggtggtcgttttggataaagttatagatttgttgttgttttttgggaagttgttggtggtcggaggcgtgggtaagggattagaagttgtggggatagagggtaggggtgttgggtagttgaagaggtggttttagaggtgtagtattaatttttagaattattttataggggttttgtttttttttttttttttcggtcgtatttcggggttgggtaaagattttaagagtttttattttaattattattggttgtttattatggtgagtgatttttttttttgttgttttatttttaattttttagaggaatttaataattttaacgggttatgttttttagatttttattttgggggtttatgttatcgttagcggtttttttagcgttttcggtatgtgtgtggatacgttttttttttgttttcgtgagtgatatttttagttatttgtttttaattttaaagtattgagtcgtttaagtattttttttttttttttggagatttggtgtttttagaaataatgtttttgtgagttaaacgaattagagggagttttttgtgatattttgaggttaggcgtttagggaagaaggaagagagtgagtttttaggtcggtaggttttttaaagaaggagtattttgatggagaggtttttgttattttttttaagaaatttcgggtagaagttagttattagaggttaggtatggtggtttacgtttgttatgttagtattttgggggatcgaggtgggtagattattttgaggttaggagttcgagattagtttggtttatatggtgaaatttttttttattaaaaatataaaaaattagttgggcgcggtggcgggcgtttgtaattttagttatttgggaggttgaagtaggagaatcgtttgaattcgggaggcggaggttgtagcgagtcgagattgcgttattgtattttagtttgggcgatagtaagatttcgttttaaaataaagaaaaaagattaaaaaaaaaaaagagttattagagagattttttagtaggtggttgtagcggtaggggatttttttattttatagtatgtatttatttagggtttgttagtttttttttaagcgattgatatgtatttttttcgttaatttttattatcgttttatgtaatataatattttcgattttattttataggaggaaattgagattatataatttgttcgggggtaagggtggtggtgtagtttggattttaaatttcgtaggtagtttgttttttagttttcgattttttggttttagggttcgttttaatcggtttttgttgcggtttagtggaagatttggagcggaataacggttttttggatcggttttattatatgtttaagagttttttaaagattttgggtaagaagaacgaggcgttttcggataataagaagaggaagaagtgatagtttcggttttgatttaggattgtattttatttttatcgtttagttatttaattttatttcgttttataggtttttattttgtggtaaaaaaaggttttaggttaggcgtcgtggtttacgtttgtaatttaatattttgagaggttgaggcgggcggattatttgagttaggagttcgagattagtttggttaatatggtgaaattttcgtttttattaaaaatataaaaattagtcgagagtggtggtatgtatttgttattttagttattcgggaggttgaggtaggagaatcgtttgaattcgggaggtagaggttgtagtgagtcgagatcgcgttattgtattttaatttgggtgatagattttgtttttaaaataaaataaataaataaaaagattttattaaagatattttgttaatttagtaaatttgtgatttattttttttacgacgataggcggttttttttttttcgcgttcggttttttaaaatcggtttcgtttttgtgacgtgttttggtgtcgcggttaattaaaaagtttaataaggatggtgttagttttttttttattttagttagttcgtttttcgttcgggttacgcgtttcgggtttttaagagggtttttaagagggttaatcggaagggtaagtttcgagatgttgcgtgattacgtgggaggagatgagttatttgaagattaattagagttcgggaagcgcggcggggtttttagatcggggcgggtttaagggtgatatttgcgttttaaagggttcgggttagttgattttcgattttgtggagtttagttgttagggtcgcggtagttgcggggagagatgattggggagcgatttagtacggcgttttcggatagacgttgggggtcgcggattttgggtttttggggaggttgtagggtttgggtgtttgtcgcgatttttttgttgttgtttttggtagttttttggtttaaggttgagaacgatttcggtttggtgagttattttttgtatagttttattttcgattcgcgtaggtgatcgatatttagtgtttttcggaacgcgggcggttgagtcgatttttcgcgataggattttttttttttttttagatttcgtttttttttatcgtttttagttttttttttttttcgggttttcgtttttttttttattcgagttttttttttttttggggtttttttttttttttgaaggcgtttttttttttcgtagatttttttttgtttcgagtttttagtttcgttttaaattttttttcgtgttttttttttttgttttgggattttattttttattcgggatttttattagatttttttttttttatcggaacgtgggtttttaaaatttttaagataagtttgtttttgttgattttttttttttttatgataggtgtagtcgttggtgattatggagtaattgttgtgggtgagcgggagatagatcggtttagtggatatttttcgtatttcgtttattatagttatttcgcggggtatttttttcgtttttgttgaggcgaggaaaatgtttttattcgatgagggggttaagtttatcgttttgcggaggtttatggattagggtataaagatgtttgggtgaaagagtcggtgttaggttggatgggtgggtagtttaatgagtttaagggttttgaggataggggaatttagagggttggttgtttgagtttttgaggggtagagggaattcgagaagggtaagtgtttaggatagtgatttggaaattgggattattaaggagttggatatttatttagtaaatatttattgggtattatatatttatattaggtattattttaggttttatgaatatagttacgaataaaatagattaaaaatttttgtttttaggatttaaattgtattggaaggagatagataagtataataaataagtaaatttttttgtttgttgtaaggtgataaatgtaatggagaaaaataaaataggataagaggtatagatagtgtaagtgttggattgtattttgggattatcggaaggtttgaggtttttagtagaaggtgggaaattaacgggaagtggtagaaagggtatttgtagagtgtttattttgggtttttttttttaattttttttaggtagtatatggttttttatagcgtttattgttaatgatggggatgttttcgatgggttgaattttggggtagtagtgagcgatgttgagataggagtagtattttttttttattttttttgtgtttataaggtcggttgttaggtggtttttattatgttggtatggagtaaggatgatggtgttttttggagtatatttcggaatttttttttggatattggtattgaagtgtttgtttttggatcgggttttggtatttaggtttttgttttaggagataggtggagggggttgttttgtggagagtttgagggatatttttaaatggatttttttttaaggggaagattttttgaagttagattttttggtttgggtgggattttttgaaagatagggtattttggtaggaatatattattaggagaagagggaattttgttattggttttttatttggtattgttaataggattgcgttagtttatgtaatatttttatgtaaagtagaaaaaggtattgtttttttggatagatataagtttgtgttagggtgtatagtttggcgagtgagtataggttgggtttaagtttttatgtattttgtggttgggtttttggtgtatatgtttagttgtatattttgggagagttttttaatttaaatagggtgtgtatttatgggatttgattggaatttttagtgagtaagggttgaatttaaggggattatatatgtgattgtatttgggaagtggtgggttttttgtttttgtttttgagtttttagagtttttttttgtgatatttagtttttttttttatagaaatagcgggagttacggaagggtcgttttatcgtgtgtggttatgggacgttggagcgggacggagttttttgtttttttagcgatgattatggtgttttttggcgttacggaagtggggttagcggtattttttacggttagtttaagtaggaaaatgattttaattttgatgaatgttaggttaggagtttatgagatgttttttatttatttgattttttttgttttttagaatattattttacgtatagatttagggtttgattgttttatttagtgttatatatttttgtttttttcggggatagggtattttttttgttttttttttgaggttttgttttttttttttagttttatgagtttttagatggtttagtcgttattaatgttcgaaattagaataattattattgttattgtcgaattgtttttcgtagttatgatgtttgtgatatattaaggtttcgtgatgtgattttcgattttgagttcgtggattttgtggtagttgtaggagttgtagttattagtttcggtattgtttttttttttaatttagtatatttagagtttcgtgagtgttttatgggtggggttagtagggagagttttgtgtttagataaggtttgggtagagattttttttttttgatttttttgttttttttaggagtgaatttgattttgcgatggagttttagtaatggtattttatggcggaaagagatagtttagttatggttaggttttagtggttatttatttttggtaattttggagggtagtatggatggagaggagtaggttttttagttttacgttttgtatgagaaaggtcggaattattatatagagagtattttcgtggttaaaattagtgtttatgggatattttgagttgtgttattgttataggggtattttgtttttaggattttgtttttaggaatacgggtttgtagagggtttgttggagacgtttgaaagatagttttatttttttttagattttagttttggtaaaattattttttttttattagggaaattattttttttaggattgaaagttaggcgtttttttttataaaaaagttttgtttttatttgagaatattgtttttttatatggttaagtgtggttttattattttttttgttttttcgggatattgattggttttgttttgggtaggtttagtgagttgtagaattgaattaatgtgaatttagggaattggggaaggttgagttttttttttggtgttgcggtaagataatcgatagggttggtgaaagtttttagatggtaggatatttggttttagagtaaggattaggtgtattattatgattgattattaattaaaatgtttgtaatttaaaatttttaatgaaggataatgaatatttgtagagtttttatggttttgttaatgtatattttcgtgtttgttttttttatgtatttttgtgagtttgggtgagttttggggagagatttgatgtgcgtattgtttgtgaaaatttgattttggtaaattaaatttttttttttttttgatatgttttttttttttgttgttgttttttttgagatagggttcgttttgttatttaggttggagtgtagttgtataattacggtttattgaagttttaattttttgggtttaagtgatttttacgttttagttttcggagtagttgggattataggttagtgatattatgtttggttaatttttttaatttttatttttagtagagataaggttgcgttatgttgtttaggttggtatggaatttttgtgtttaagtaatttttatgttttagttttttaaagtgttgaggttatagttatgagttatcgtatttagtttatatttttttttattatcgagaaataggttgatttttataggtgtaatgagtatgaagggagtgttataagatattttttattttttatttatttattttttaatttaatttttttttttttgagatggagttttgttttggtatttaggttagagtgtagtggtgcgatttcggtttattgtaatttttgttttttaggtttaagcgatttttttgttttagtttttcgaatagttgggattataggtgtttattattatattcggttaatttttgtatttttagtagagacggagttttattatgttggttaggttggttttaaatttttggttttaggtgatttattcgtttcggttttttaaagtgttgtgattataagtatgagttatggtgtcggcgggttgatttttttaatttttagtagagataaagttttattatattgtttaggttggttttaaattgttgagtttaagtaatttgtcggttatgtttttttaaagtgttgggattataggtttgagtttttgtatttagtttgtaagatattttaaaatttatatttggttaagcgtggtggtttatatatataattttagtattttgggaggttaaggtgggcggattataaggttaggagttcgagattagtttggttaatatggtgaaattttatttttattaaaaatataaaaattagttaggcgtgttggtttatatttatagttttagttatttaggtggttgaggtaggagaattatttgaattaggaggcggagtttgtagtgagttgagattatagtattgtatattagtttcggtaatagagtgagatttcgtttgaaaaaaaaaaaatttacgttgttttatatttttaatatggggtaggatattattttttatgaaatagggtgtaagtgtgtgaaatgtagatgggaattttgttttagttagtttgatagagaagtgagtattttttatggtaaattatgtaagaaaatattttttaggtagatgtttatgaaaagaatttgtttagtttgtaggtaagtgggagagtttttgtttaaaaaaaaaaagaaaaagaaatagtggaagataaaaaggaaaggatattatgaatgtttgatttatgaattattatttgttagaaatagaagtgttgggaggtttgagagatagatattatttttttggttaggtgtggtggtttagatttgtaatgttagtatttcgggagattaaggtaggatgattaaattaaagggtattttgggtaatatggtaatattttatgtttaaaaaatttaaaaattagttaagtatggtaacgtatatttatagttttagttatatgggaggatggtttgatttttttgattttaggagttcgaggtagtagtgagttatgattgtattattgtatattaatttaggtgatagagtgagattttatttttaaaaaattaaattaaaataaaaaatttttaagaaagaaaaaaagtttgatttttttttttttattttttatagatttatggaatttgaagttttggtgttggagttattaggtattaataagttttttgggtgattcgtaatacgtttaagtttgaaaattagggttagaatttttaaataagtgtaagtgtttagttaaaatgaattatatgtacgttaaagttgtagaaatagttaaagaattttttttttttagtttttttttttttttttaatatatagggaagggttaggtgtagtggtttacgtttgtaattttagtattttgggaggtcgaggtgggcggattataaggttaggggttttagattagtttggttaatatggtaaaattttatttttattaaaaatataaatattagttatatgtggtggtatacgtttgtagttttagttattcgggagtttgaggtaggagatttatttgaatttgggaggtagaggttgtagtgagtcgagattatgttattgttttttagtttgggcgatagagtaagattttattttaaaaaaaaaaaaaaatatataggaaagattgggataagtggtaggagattgaaaggggaaagagtttgtttgtattaatgggataaagtgggtcgattttgggtatattgtttatgagttagttttattttgtgaggaaattttttttttttttttgagatagagttttgttttgttgtttaggttggagtgtagtggcgtaattttggtttttcgtaatttttgtttcgttggtttaagtaatttttttgttttagttttttaagtagttgggattataggcgtttgttattacgttcggttaattttttggtatttttagtagagattcggttttattatgttggttagattggtttcgaatttttgattttaggtaatacgttcgtttcggttttttaaagtgtcgggattataggtgtgagttattttattcggttaaggaaatatttaaaaaataaaataaaataagttatttaaaaattggggtaagttggttgggtacggtggtttacgtttgtaattttagtattttgggaggttgaggaagggggattatttgaggttaggagtttaagattagtttggttaatatggtgaaatattgtttttattaaaaatttaaaaaattagttaggtattgtggtaggtatttataattttagttatttaggagattaaggtaggagaatcgtttgaatttgggagacggagattgtagtgagttgaaattatgttattgtattttagtttgggttatggagcgagatttttttttaaaaaaaaaaaaatcggggtaagtgttattaatttaaaaaataataattaaaaagtttagaatttaggttaggcgttgtggtttatatttataattttagtattttgggaggtagaggtaagcgaattatttgaagttaggagtttaagattattttggttaatatgacgaaatttcgtttttattaaaaatataaaaattagttgggtgttgtgggtcgcgtttgtagttttagttatttaggagattgaggaaggagaatcgtttgaattcgggagcgagaggttatagtgggttaagattatattattgtattttagtttgggagatatagcgagattgttttaaataaacgaataaaagttgagaatttagtgttgttgttttttatagatggagttttgttatgttgtttaggttagatttagattgaagtttaagggatttttttgttttagttttttagagtagatagagttgggattgtaggtatatattattgtattaggtttagaatttagtttaaagagtttatttatcggttttttttttttttttttttgtttttttttttttacggttttttttttatgcggagtcgaagttggattgtattgttgttatttcggtttattgtaatttttttgtttgatttttttgttttagtttgtttagtgtttgttattgtaggtacgcgtcgttatgtttgattggttttggtggagacggggtttcgttgtgttggtcgggtaggtttttagtttttaatcgcgagtgatttcgttaattttagtttttcgaggtgtcgggattgtagacggagtttcgtttatttagtgtttaatggtgtttaggttggagtgtagtggcgtgatttcggtttattataatttatattttttagtcgtttgttttggttttttaaagtgtcgagattgtagtttttgttcggtcgttatttcgtttgggaagtgaggagcgtttttgtttggtcgtttatcgtttgggatgtgaggagtttttttgtttggttgtttagtttggaaagtgaggagcgttttcgttcggtcgttattttatttaagaagtgaggagcgtttttttttagtcgttattatatttaggaagtgaggagcgtttttgttcggtcgtttatcgtttgagatgtggggagcgtttttgtttcgtcgttttatttgggatgtgaggagtgtttttgttcggtcgagatttcgtttgggaggtgaggagcgtttttgttcggtcgtttcgtttgagaagtgaggagattttttgtttggtaattatttcgtttgagaagtgaggagttttttcgtttcgtagttattttatttgggaagtgaggagtattttcgttcggtagttatttcgttcgggagggaggtggggggggttaatttttcgttcggttagtcgttttatttgggagggaggtggggggttagttttttcgatcggttagtcgtgttattcgggagggaggtgggggggttagttttttatttggttagtcgtgtcgttcgggagggaggtgggggggttagtttttcgttcggttagtcgtttcgttcgggaggtgaggggtgtttttgttcggttatttttattgggaagtgaggagttttttagttcggttagttatttcgttcgggagggagatgggggggttagtttttttattcggttagtcgttcggttcgggagggaggtgggggggttagtttttcgtttggttagtcgttttgttcgggagggaggtgggggggttagtttttcgttcggttagttttttcgtttgggaggtgaggggcgtttttgttcggtcgtttttattgggaagtgaggagtttttttgttcggttagtcgtttcgttcgggagggaggtgggggtgttagtttttcgttcggttagtcgtttcgttcgggagggaggtggggggggttagttttttcgttcggttagtcgtttcgttcgggaggtgaggggcgtttttgttcggtcgtttttattgggaagtgaggagtttttttgttcggttagtcgtttcgttcgggagggaggtgggggtgttagtttttcgttcggttagtcgtttcgttcgggagggaggtggggggggttagttttttcgttcggttagtcgtttcgttcgggaggtgaggggcgtttttgttcggtcgtttttattgggaagtgaggagtttttttgcgcggttattatttcgtttgggaggtgtgtttaatagtttattgagaacgggttaggatgataatggcggttttgtggaatagaaaggtaggaaaggtggggaaaagattgagaaatcggatggttgtcgtgtttgtgtagaaagaagtagatatgggagattttttattttgttttgtattaagaaaaatttttttgttttgggattttgttgatttgtgattttatttttaattttgtgttttttgaaatatgtgttgtgtttatttagggttaaatggattaagggcggtgtaagatgtgttttgttaaatagatgtttgaaggtagggtgttcgttgggagttattattaatttttaattttaagtaattagggatataaatattgcggaaggtcgtagggttttttgtttaggaaaattagagatttttgtttatttgtttatttgttgattttttttttattattgttttatgattttgttaaatttttttttgtgagaaatatttaagaattattaataaaaaaataaatttaaaaaaaaaaaaaaaaaaaaaaaaagagtttatttaattgtaaatgttgaggaagtggttcgtttagagttgaagattttaaagaatattagtttatgttttaaaagtgtagaagtttggaatcgtttatataaatagaaagtttatggaaatttagaattttaatattgttttgtgtttataattggtgggtttttggttttattgatttaaagaatgaggtcgtagatttttacggggagtgttatagtttttaaatgcggcgtttttggagttgtttgtttttttcggggggttcgtgttttcgttagcgttaggagtgaaattgtatatttttgcggtgagtgttatattttataaaagtagtgtggatttaaagaataaatagtaataaaatttattgtaaagacggaaataataaattttttattttatggaaaatgattagagcgggatgttattatttatttaggtagtttgtttttatttttttatttggttttatttatattttgttgattggtttattttatagagagttgattggttcgttttatagagagttgattggtttattttgatagggtgttgattggttcgtttataatttttgagttagatataaaagttttttatgtttttattagattagttagatatagtgtcgattggtgtatttataaattttgagttagatataggatgttgattggtatatttataaattttgagttagatatagagtgtcgattggtgtatttataattttttagttagatataaaggttttttaagtttttattatatttaggagtttagttggttttatttagtggatttcgtattggggtcgtaggtggagttgtttgttagttttgttttatgcgtttgcgttttttagtttttgggaggttgatgggattgggggtcgtggagtagggggtggcgttcgtcggggaggttttgtagtataggagtttacggcggggttggggtttaggtatggcgggttgtaggttttgagttttgttttgtggtgaggtagttaaggtttcgtgagaaatcgagtatagtaagttgttggtttaggtgttaaattttttattgttttgttcggggtttgtgggttagtttgtcgttttaagagcggggtagtcgagtttacgtttattcggaatttgcgttggtttataagcgttgcgtgtagtttcggttttcgttcgcgtttttttttttatattttttcgtaagtcgagggagtcggtttcggtttcggttagtttagagaaggtttttacggtgtagtggcgggttgaagggttttttaagcgcggttagaatgggcgttaaggtcgaggaggcgtcgagagttagtaagggttgcgagggttgttagtacgttgttaatttttagttttatggtaaggtttattgtatagttataatgatttgattagttaatttttttttttttttttggggggtgggggaaggtgttttttatattttatattgaagatgtaatagttatggggttttgggtgttatttggtttgagttaggtataggataataaaggaggtagttaatttataataaagattagtgattggaaaggaggttttattatagaataagagtaatgtggaggagagtttgtaagaagtagaattgtaaatatgttatatgatttagtttttaaggtttaatttttattttggtataaatttagagttttgaagttttgttttttttttacggtggattttgtatattattgtttggtgagtgttcgttggattagtagttaaattttagtatgaaattttttttttaatatttttttttattttgtatggttttttttttttttatatattgatttttatttttagtttttttgtttaggattaaattagtttaagttttttttgtttttttagttgttttttaaataagggaaagagatagtaataatgaatattgatttgaatagtaaatattagggattagggattatggatatttttttgttaatgtaatttttttaattaaaagttatgataaggagggaataggaaaaagtattttttttttttttttgagatagggttttattttgttatttaggttggagtgtagtagtatgattatagtttattgtaattttgattatttgggtttaagtaatttttttattttagttttttgagtagttgggattataggtatttgttattaagtttagttaatatttttatttttgtagaaatagggttttattatgttgtttaggttggttttaaatttttgggtttaagtgatttttgattattttattcgttcggttttttaaagtgttagagttataggtttgtttatttatagttatttaataatttttgtttaagaaaggattgggaaggaagattaaagtaatggtttggatatttttttaataataataataataataataaaattataatagatttaaattattatagtagaagtataggtttttttttttttaatattttgggatttttttttttttttgagatagagttttgttttgttgtttaggtaggttggagtgtagtggcgtgattttaatttattgtaattttcgtgttttaggtttaagtgatttttttgttttagttttttgagtatttgggattataggtgtttattattatatttggttaattttttgtatttttagtagagatgggtttttattatgttgattaggttggtttttattaaaaatataaaaattagttgggtgtggtggtatgtttttgtagttttagttattcgggaggttgaggtagaagaatcgtttgaatttgggaggtagaggttgtagtaagtcgagattatgttattgtattttagtttggtgatatagtgagattttgttttaaaaaaaaaaaaaaaagaggtcgggcgcggtggtttatgtttgtaattttagtattttgggaggttaaggtaggcgaattatttgaggttaggagtttaagattagttttattaatatggagaaatttagtttttattaaaaatataaaattaggttgggtatagtggtttacgttatttagtattttggggaggttaaggcgggcggattatttgaggttaggagtttaagattagtttggttaatatggtgaaattttcgtttttattaaaaatataaaaattagttaggcgtggtagtgtatgtttgtaatgttagttattgaggaggttgaggtaggagaatcgtttgaattcgagaggggaaggttgaagtgagtcgagattacgttattgtattttagtttcggtaataagagcgagattttgttttaaaaaaaaaaaaaaaaaaaaaaagttggttagaggcggtaattatatgtttgtaattttagttttagtattttggaaggttaagacgggtagattatttgagtttaggagtttgagattagtttgggtaatatggtaagattttatttttataaaaaatttaaaaattagttggggtagtggtttatatttgtagttttagttatatgggaagttgaggtgagagggttatttgagtttaggaggtagaggttgtagtgtattaagatcgtattattgtttttaaatttgggcgatagggtaagaaatttgttttaaaaataaataaataagaaatttatagtatattaggttaaatatttttataaaaaaattttttaggtcgggtacggtggtttatgtttgtaattttagtattttgggaggttaaggcgggcggattataaggttaggagatttagattttttggttaatacggtgaaatattgtttttattaaaaatataaaatattagtcgggcgtggtggcgggagtttgtagttttagttatttgggaagttgaagtaggagaatggagtgaatttggaaggtagagtttgtagtgagttgagatggtgttattgtattttagtttgggaaatagagtaagattttgtttgaagaaaaaaaaaattagagtgaaaaaataaaaaggttgatgagtttgtgttttacgaaaaattttttaaatttttaaattgttttaaattttttttttttttatttttttattttttttttttagttatatttatatatatatttttttttttttttttttttgagatagagtttcgttttgttatttaggttagagtgtagtggtatgatttcggtttattgtaattttcgatttttagatttaagtaatttttttgttttagatttttaagagtagttgggattataggtgtttattattatattcggttaatttttgtatttttagtagcgatggggtttttttatgttggttaggttggttttaaatttttgattttaggtgatttatttgttttcgttttttaaagtgttgggattatagtcgtgagttattgtgtttaataatatattttttttaaagatagggttttattttgttatttagtttggagtgtagtattgtaattatagtttattttagttttgattttttaggtttaagtagtttttttattttagttttatgagtggttggaattataggtgtgtgttattatatttgttaatttttgtattttttgaagatacgaggtttcgatatgttgtttaggttggttttgaatttttgggtttaagtaatttattaatttcggttttttaaagtgttgggattataggtgtgagttatggtaattggtttgaatattaagtgttattagggaattaaatttgttttttttaggtataatagtattgtgaatatgtagatgaatatttttattttttggagatgtatatttaaatataaagggataaaatgttataatttttttaatatattttgaaatgattttattaaatataagtatatatagatgttaatattattgtttttgttaattttttttttttttttttttagatatagggttttggtttgtcgtataggtcggagagtagtgagtggaataattatggttttgtagtttcgattttttgggtttaagtgatttttttattttagttttttaagtagttgggattataggtgtttgggagtatatttaattttttaattttgtagagaagtggttttcgtttaggttggttttaaatttttgtattttagtaatttttttgttttgattttttaaagtattgggattatagatattagttattacgtttaattaaaatttttaaaagtttttttttttgttttataatagtttttttgttttttttagaggtaattaatttagtgtggagtataggtattttttgggtggtattaggagatgggatttgttttttgttttaaggtggtattagttaatgttgtaaggttttttgaagaaggttttttttttttagtttattatttgttattagtaaataattggggattattagttgatatttttatttttattatattttttagaatttaagataggtaatagttagtttagaatgtgatttatttttatttgaggtttatttgattggaggtaataaagtttaatattttaagagttagtaggtattttaatttttaggataatttgtttttttatatagtttttggaaaataatataagaattaaaaaaaaaaaaaaaaaaaatagttaggtttggtggtttaggaggtagaggttgtagtgagttaagatggttttagtgtattatagtttggataatatagtgagattttgtttattttatttttttttaaaaaaagttatgggaaagtagaatgttaatgaaaagaaagtattataattaataaattaatagatgggtttgagatgttaaaaattaggtatttttgtacgttattgggtagtagagtttatgatggttttgtggttgttttggttgtaggtaataaatttatgtaataaataaagtaggttgggtgtagtggtttacgtttgtaattttagtattttgggagggcgaggtaggtgaattataaggttaggagtttaagattaatttgattaatacggtgaaattttgtttttattaaaaatataaaaattatttagacgtggtggtattatttgtaattttagttatttaggaggttgagttaggagtatcgtttgaatttgggaggcgtaggttgtagtgagttgagattatgttattgtattttagtttgggtaatagagtaagatttttattttaaaaataaaaataaagtagttttggagttggagtattttattttattttttatgttttaaaattttttttttatattatttttgatttttttgttttatattatggattatttttttttttaatttattaattttttatttagttggtttgttgtttattttgtttattgtgtatttttgttgttttttttggtttttatttttagagatggtgttttgtaatattatttaggttggtttcgaatttttgggtttaggtgatttttttattttggttttttaaagtgttgggattataggtatgagttattatatttagtttttaagttatgtttttaagatattaagaaatattttagatatgtaaaaataagaaatgagaggttaggtatattatatatgtttatatattattagtatgtaaatatatattaatgttatatataattaatatgtaaatattacgtattattagttgttggttttgttttttttgagatagagttttatgtttttgtttaggttggagtgtaggggtttaattttggtttattgtaatttttattttttgggtttaagtaatttttatgttttagttattagagtatttgggattataggtgtgtattattatatttggttaatttttgtatttttagtagagatagggtttcgttatgttgattaggttggttttaaatttttggttttaagtgatttatttgtttcggttttttaaagcgttggaattataggtatgagatattgtatttagttttaaaagtttttaaggttatttttgggttttagaatttttttataatttaaaagatgtaaattttatttatgagttttgttggtgtaggtttgggtgtattttataaagtttgcggttgtgattttggttaatgggtagaaattttatttttcgaatattgataaaagagttttaagtagtttttgggtttttgtagtatggttgaagtagagtggaaatggggttttattatgttggttaggttggtttttaatttttgattttaggtgtagaagatgaggttagaaagttgatagagttagattgggaggattttgttgggtggtttttgtaagatggagatttttattttgagtgaaatggtagttgttataggatttttagaagaggggagatatgatttgatttttgatttggaaggaattttttggttgttgtgtggagagagtttgtaacgggtaaaagtggaagttaggagattaggtaggagatagttgtagttgtttaggtgagagttaatggtggtttttattaggatggagtagtagtaaaggtgtgagatatagattttcgtgttatttttaagatatagatagtatgatttgttgataaattagatgtagtatgtgagaataggagagtagttaggtagattttaagggtttagtttaagtaattggtaggtagaggtgttatttggagggttagtatattggttagtgggtaaggattttaaggatttttgttttttatttttgtggggagataggttgaggttaagttttaggaggtttattgtttatagtagttgaagtagtaggttagtcgttattagagtaattgtaagttggggagtttagtttgggaggatgggaaggaggattgtttattattgaagttgttttatttttggtatggaaatggggtttaaagaaatgaggaaaataggtcggcggtggtttacgtttgtaattttagtattttgggaggttaaggcgggtggattacgaggttaggagatcgagattattttggttaatacggtgaaatttcgtttttattaaatatataaaaaattagtcgggtgtagtggtggacgtttgtatttttagttaatcgggaggttgaggtaggagaatggcgtgaattcggaaggcggagtttgtagtgagtcgagatcgcgttattgtattttagtttgggcgatagagcgagatttcgttttaaaaaaaaaaaaaaagaaatgaggaaaatagtattttggggttgaggttttttagtattattattgtgtgagaaaagaagtttacgtgattattttattatggttgtagtttagttttatattttaaatttgggattagtatttattatataggggaggatttgaattatataaagggtaggggaatgtagaagagatttttggggataagaaatgaaattaataaagttgagtatggtggtatatgtttgttgttttagttattgaggaagttgaggcgggaggattattttagtttaggagtttaagttagatttgggtaatagagtatgattttatttttttatttatttatttagagataaggtttattttgttgtttagattggagtgtagtggtataattatggtttattgtagttttaatttttagggtttaagtaatttttttattttagttttttaagtagttgaattacggtatgttattataatcggttaatttttaaaattttttgtaggaattggattttatcgtgttgtttaggtagattggttttaaatttttgggtttaagagatttgtttattatggttttttatagtgttggggttgtaggtgtgagttatcgtattatgttttttttttgttagagacgggataggtcgggtttggtggtttaagtttgtaattttagtatttggggaggttaaagtaggtagattatttgattttaggagttagatattagttaggtaatatagtgaaatttttattgtataaaaaatttaaaaattagttgggtatggttgggcgcggtggtttatttgtaattttagtattttgggaggtcgaggtaggtagattatgaggttaggagatcgagattattttggttaatacggtgaaatttcgtttttatttaaaatataaaaaaattagttaggcgtggtggttggtatttgtagtttttgttattcgggaggttgaggtaggagaatggcgtgaatttgagaggtagagtttgtagtgagttaagatcgcgttattgtattttagtttgggtgatagagtaagatttcgttttaaaaaaaaaaaaaaaaggttaggtacggtagtttacgtttgtaattttagtattttgggaggttaaggtaggtggattacgaggttaggagatcgaaattattttggttaatacggtgaaattttatttttattaaaaatataaaaaattagttggtcgtggtggtgggtgtttgtagttttagttagtcgggaggttgaggtaggagaatggtgtgaatttaggaggtggagtttgtagtgagtcgagattgtattattgtattttaatttgggcgataaagtaagatttttttttaaaaagaaaaaaaaattagttgggtatgatggagtatttgtagttttagttattttagaggttgaggtgggaggattatttgagtttaggaggttaaggttgtagtgagttgtaattttgttattgtattcgagtttgggtaatagtgatattttgttttaaaaaaaagagagggtaggttcggtgtagtggtttatatttgtaattttaatattttgggaggtgggtgaattatttggagttaggagtttgagattagtttggttaatatggtgaaattttatttttattattgaagaaaaaaaaaaaaagagggtgggtaggaattttgttatttatttataaataaggaaattgttatgggaattattgaggaatttagttaaagttaatttagtagtaagtgtttagtttggtttttgaatttttttgaaatagttttattttgttatttaggttggagtgtagtggtgttattttggtttattgtaatttttattttttaggtttaagcgatttttatgttttagttttttaagtagttgggtttataggcgtatgttattatgttcggttaattgtatgtatgtatgtatgtattttgagatgtagttttatttttgttgtttaggttagagtataatggtatgattttagtttattgtaattttcgtttgttaggtttaagtgatttttttgcgttagtttttcgagtcgttgggattataggcgtgtgttattatatttggttaatttatttttgtatttttagtagagatagggttttgttatgttggttaggttggtttcgaatttttgattttaggtgatttatttgtttcggttttttaaagtgttgggattataggcgtgagttattatgtttggttttaattgagatggagttttattttgtcgcgtaggttggagtgtagtggcgggattttgatttattgtaagttttatttttcgggtttacgttatttttttgttttagtttttcgaggagttgggattataggcgttcgttattacgttcggttgatttttgtatttttagtagagacggggttttatcgtgttagataggatggttttgattttttgatttcgtgatttgttcgtttcggttttttaaagtgttgggattataggcgtgagtttggtttttttttatattttttttagtagagatggggttttattatgttggttaggttggtttttaatttttgattttaggtgatttgttcgttttagttgcgattacgggtatgagttattatgttaggttttgaagttttttatgtttataaatgtgtatggaagggtggattataaatgaattataggaaaatatatgaataataataaaagttgtaggttaggtgtggtggttttggtttagaattatagtatttttatttttagaggttgaggttggcggattatttaagttcgggagattagttcgattaatatggagaaattttatttttaataaaaatataaaattagtcgggcgtggtggtatataattttagttatttggtaggttaaggtaggagaatcgtttgaatttaggaggtagaggttgtggtgagttaagatagtgttattgtattttagtttggggaataagagtaaaattatgttttaaaaaataaaaaaggttgggcgcgatggtttacgtttgtaatttttgtattttgggaggttaaggcgggcggattacgaggttaggagatttaagattattttggttaatataatgaaattcgtttttattaaaaatataaaaaaattagtcgggtatttgtagttttagttatttcggaggttgaggtaggagaatggtttgaatttgggaggtagagtttgtagtgagtcgagatcgcgttattatatgttgtttgggcgatagagcgagattttattttaaagataaatgaaataagtaaatgttaggcgtggtggtttacgtttgtaattttagtattttaggaggtcgaggcgggcggacggtgaggttaggagttggagattattttggttaatgtggtgaaatttcgtttttagtaaaaatataaaaattagttgggtatagtggtgcgcgtttgtggttttagttattcgggaggttgagggaggagaaatcgtttgaatttgggaggtggaggttgtagtgagttatcgcgttattgtattttagtttggcgatagagtaagattttgtttttttcgttttttagaaaagtagaaagttgtagtagaatatatgaagatttattttttttgaaaaatgaaaaatgggttagtatggtggttgtttgtaatgttagtattttgggagtttaaggtgggtaaattataaggtcgggagttcgagattagtttggttaatatggtgaaatttttatttttattagaaatataaaaaattagcggggtatggtggcgggtatttgtagttttagtgatttgggaggtttaggtagaataatggggtgaatttgggaggtagagattgtagtatgagtcgagattacgttattgtattttagtttgggcgatagtgtaagattttatttttttaaaaaagaaaaatgttgtttcgtgtttggtgaattattttatttttataaagtttaaaagatacgtaaaattaaaatgatattgtttagtaatgtatttagtaaaattattaagaaaagttagaggatgatatatttagttaattttttaagtaggaagaagaaaaagagaaattgaattagataggtttgttttaaagttattggtaatgttttggttaggtatattatttgaggttaggagttcgaaattattttggttaatatggtgaaatttttatttttttaaaaaatataaaaataaggtgtgtagttgtagttttagttattgggaacgttgaggtacgaaaattatttgaattcggggagaggttgtagtgaatttaaattgcgttattatattttagtttaggtgataaggtgtaattgttttaaaaaaaaaaagatggttaattgggtagtcgtggatattttataattattaaaaaaaatttaaattcggttaggtatagtggtttatatttgtaattttaatattttgggaggttgaggtaggcggatggtttgaggtgggtggattatttgaggttaggagttcgagattagtttggttaatatggtgaaattttgtttttattaaaagtataaaaaatagttaggggaggtgttaggcgtttgtaattttagttatttaggaggttgtgaggtaggagaattatttgaatttaagatgtagaggttgtagtgaggcgagattttgttattgtattttagtatgggtaataagggcgaaattttatttttttttttgttagaaaaattattttaaatgattgttaaaagtttagtgtattatatataatattatgttatttaattaagaatttttaatattaggtttaagagttaagtttaatttagtattaattagtttacggggttttatttttttttttttttaagacggagtttgtcgttaggttggaagtgtagtggtacgatttcggtttattgtaattttggattttttggtttaaagttatttttttgttttagtttttcgagtagttgggattataggtatgtattattatatttagttaatttttgttttttgttttagtagagatagggttttattatgttggttaggataattttaattttttgattttgtgatttatttatttcggttttttaaagtgttgggattataggtatgagtaatttgcgtttagtttttttaatttttttgtattattgttttgagattaaattacgttttttttattttaaaatgttttattggaattattttgataaaagtaaatatttgtatataagataaatataggaaatagaagttatttatttgaagtgttttttaatttttaggtattttttttttaataaggtgatagttgtttatataggataatataggaaagttgtaagtttttaggatatgtttagtattaggcggaagatattgtgttagtaaatttttgaaaaataataaaaagaatattagaattatatgagatgtattaataaaaaaacgattttatattttttgtagtaatatggatgtaattataggttatgatttttagtgaattaatatagaatagaaaattagatattatatgtttttatttgtaagtgggagttaaatgttgagtatatatggatataaagatggtaatagatattggggagaggaaatggggtaaaggtttaataattattgggtattatgtttattatttgggtgatggggataattttattttaaattttagtattatataatgaatttaagtaataaaattgtatatatattttttaaatttataataaaagttgaggttgggtatggtagtttacgtttgttaattttaatattttgggaggttaaggtagaagtgttcggaggttaaggtaagataattatttgagtttaggagttttagattagtttgagtattatagtgggattttattatttatagttttttttttttgagatggagttttgttttgttgtttagggtgaagtgtaatggcgtagtgtaatggcgttatattagtttattgtaatttttattttttaggtttaagcgatttttttgttttagttttttaagtagttggaattataggcgttcgttatttatgtttagttaatttttgtatttttagtagatagggttttacggtgttggttaggttggtttttaatttttgattttaggtgatttatttattttggttttttaaagagttgagattataggtatgagttattatatttatttttaaatttaaaaaaaaaaaaattagtcggggatagtggtgtatgtttgtaagttattagttattttaagggtgaggtgagaggtgagtttttatttaggaggttgaggttgtagtgagttgtgattgtattattgtattttagtttgggtgatagagtaagattgttttaaaaaatagaataaaattgttagatgttatggtttatatttgtaattttagtattttgggaggttagggcgggtaaattatttgagattaggagtttaagattaatatggtgaaaatttttatttttattaaaaatataaaattagttgggtatggtggcgtatgtttgtaattttaagtattcgggaggttgaggttataatgagttgagaatgtgttattgtattttagtttgggcgataaagtgaaattttattttaaataaaaaataaataaaaatatatgttgcgggttgggttcggtggttaatatttgtaatttgagtattttgggaggttaaggtgggtagattttttggttaggagtttaagattagttcggttaatatggtgaaattttttattaaaaatataaaaattagtcgggattggtggcgtatgtttgtaattttagttatttgggaggttgaggtagaattgtttgaatttgggaggtagaggttgtagtaagttaagagtgtattattgtattttagtttggatgatagagtaagatagttttaaaaaatatataaaatatgttggggtggggtatagtggtttattgaggtaggagttgaagattagtttgtgtataaagtgagattttgtaatatagtttagatttgtttttttattaaattttatattgaattgtaatggattattggggtggattttttatgaatggtttaagtattattttttttgatgttgtgtttatgatagttagttttttagagattaatttattaaaaatgtgtggtatttttttgtttttgttgttgttttggttatgttatatttttgtttttttttgtattttatgtaatatagttttttgaggtttttattagaggttgagtagatgttaatattatgttttttgtatattttgtagaattatagttaattaaattttattatgtaagtaattggttataaaaatatgaattataggagattgtcggtaggatgaaggtggattaggtgggtttaaagatttttagagaaaagtttagagatttttgtttaattagattattattattatttttattgagagttaaaataaaagatatttattatagtaaggaaggagaataggtatggttttttattttttttagtttgaaggttaagttgtaggaattattgtttaagtatgatagttatataaagtttttttttatgagggggagattttaaattttagatttttatttagattagtgtagaatttttgtgaaggtgtattgtttttggttgggtttttagagtttattttaataaggtgaaaataagataatttgaaaataaatagaattatggtttttttattggtttttttggagatttaagtatttagttttttaaatgagttagaatttagttttgatattatgattagtatcggagattttagtttgtgaaattattatttttaattagggagatttggattaagggaagtttttttggaaagagatttagtatatttaaagaaaatataatagttttagtatatattgatttaataaatgagtttaggagtggacgttagaaagggaggagtagaaagtaatttaaaatagtagagaatagttttattgggaggttttagtgtatttttattttgtagtagaaatgaggggaggagttaggttatttagtttttaataaaaatacggggatttattaaaacgtaaaaatataggtcgggtaaagtggtttacgtttgtaatttcggtattttgggaggtcgaagggcgtggattaattgaggttaggagtttgagattagtttgattaatatgagtgagatttatgttttttcgttttttaaaaaagtaaaaatagaatagttataaggaaaatgatgtaaattaaaaagagtaagattgttttttcgttttttaaaaaagtaaaaatagttataaggaaaatgatgtaaattaaaaagtaatttttagaaagttattaatattagacgtagtaatttatttttgtaattttagtattttgggagattgaggtaggaggattgtttgagtttaggagtagagattagtttggataatatggtaaaagttcgtttttgtaaaaaaattaaaaattagttaggcgtggtggtagtacgtgtttgtagttttaggaagttgaggtggaaagattatttgagttttgacggtggatgttgtagggagattttggtattgcgttttgttttaaaaataaaatagtaaaaataaataaatggaagttattatttgtggtatatggattatagtttaaaaaagaaaaagtggtcgggtatagcggtttacgaggttaggagatggagattattttggttaatatggtgaaattttttttattaaaaatagaaaaattagtcgagtgtggtggcgcgggtttgtagttttagttaatcggtaggttgaggtaggataatcgattgaattcgggaggtagaggttgtagggagatcgtattattgttagttcgggtaataagattaagattttattttaaaaaaaaaaaaaaaaaggaaaaaattggttaaggtgggagaatcggttaaattcgggagttgaaggtcgtattgaattgtgtttttgttattgtattttagttagggtgatagggaggttgttttaaaaaaaaaaaaaaaaaaaaggtcgggcgcggtggtttacgtttgtaattttagtattttgggaggtcgagaggggcggattacgaggttagtagatcgagattattttggttaatatagtgaaattttttatttattaaaaaatataaaaaattagttaggtttggtggtatgcgtttgtaattttagttaatcgggaggttgaggtaggagaatcgtttgattttagaaggcgtaggttgtagtgagatcgtgttatcgtattttagtttgggtgataaggcgagattgttttaaaaaaaaaaaaaaaaaaagggtagggaggcgtataatgtttatgaacgaaagtttgtttgggaataaagtttttcgaagaggtatttaaaaggttttcgtatttaatatttatttttatttaaggataatacggcgatgaacgttttataatttttaacggggaaatgaaatagaataaaagattaggaattttggttatgaattcgttgagtttgagaaatgttggatcgagggggcggttagagcgttgcggtgatggtattagcgatatatttagagttatttggggttattattattttttttttattttcgggcgatcgttatttttattttgtaattattcgtttaattttatttatagttgttttgagttagtaggggttgtggggtcgttagtcgagttttttttgttacgagttaggttagttttaagtaaagatattagaaattttagtgtgtaacggtagtttatttaattgtattggggatcgtttttttttattttagttaggtcgcgacgtggtcgttcgtcggttgttgcgtaaaggtagcgtaagtcgttgggattttttgtttttttttatttaatagtcgggttattataatttttatattgttaatttacgagtttatttcgtaaaaagaattaaaatggcgaggtcggggttatttatggcggcgtcgggttgggggtttgacgggtatagttgtttttttatttgtttggttagacgcgcggtattttttttattgtttgtttatatagaaataaaataaagtgaaagaaagattaggaaagtatgttttatatttttttgggtaaatattcggagatgttttttgaattttgaaaaataaaaaatagggatttgtttggttaggcggaagaaagttttcggcgtcggtcggttagcgttagtcgggtgttgtttttaagtcgttttttagtagtttatggttcgttaatgattttgggatttttttcgcgcgcgcgcgggcgcgcgtagttgcgttagtttagcgtttagttattttgatatttcgtatttcgtttttttagcgaaatttgaatttgttttttagttcgatttcgtagattgttaggtattttaatttttaattaaataaaataaaataaaaattaaaaatttaaaaggtaggtcggacgtaataggttacgtttgtaattttaatattttggataggtttaggtagaggattatttgaggttcggagttcgggattagtttgggtaaatagtgatatttaattttcgtttttatttatttaaaaattaggtcgggcgcggtggtttacgtttgtaattttagtattttgagaggtcgaggtaggtggattacgaggttaggagatcgagattattttggttaatacggtgaaatttcgtttttattaaaaaaaaattagtagagtgtggtggcggcgtttgtagttttagttattcgggaggttgaggtaggaaaatggcgtgaatttaggacgtcgagtttgtagtgagtcgagattgcgttattgtattttagtttgggcgatagggcgagattttgttttaaaaaaaaaaaaattattgaaatttataagttattttaaattttttttggatttttttttatcgtttttatttataaacgcgtatgatgtttggtgatgtgtgttgtgtgtgttggtattttttttttttttgagacggagtttgattttgttgtttaggttggagagtagtggcgggatttcggtttattgtaattttcgttttttcggtttaagcgatttttttgttttagttttcgaagtagtaaggattataggtgtatataattatgtttggttaatttttatatttttagtagagttagggttttattatgtaagttaggttggtttcgaatttttgattttaggtgatttgtttgtttaggtttttataaagtgttaggattataggtgtgagttatcgagtttggtttttttttttttttttttttttttttttttttttttttttttttgagatagggttttgttttgttatttagattggagtgtagtggtatgatttcggtttattataatttttgtttttcgggtttaagtgatttttttgttttagttttttgagtagttgagattataggtatttgttattatatttagttaattttatatatttttagtagagataggggtttttattatgttggtttaggttggttttgaattggtgaattttagtgatttttttatttcggttttttaaagtgttgggattataggcgtgagttatcgtggttagtttagtttagtggttttttttatattggttgtaaattataaatatttgggtagttttaaatgtttatattgttttttttgagattttgaattggtttgagagaggtttggtatttgtatttttttagtattttttaatcgttttattgttttattagggtggagagttatggtttaaagttaaagtatttgttttttttattgtttggtaagtatataaaaaaaagattagttatgggtggtggtatatacgtgtagttttagttaattaggaggttaaggattaattgagtttaggaggtcgaggttgttatgaatcgtgattatattattgtattttagtttgggtaatagagtgagattttgttttaaaaaaatatatatatatatatagaaagttttaatttttgttgttttggtagttaagttgtttttattaagtgttatggttagaggttttagtttttttttttttttttttttttttttttgagatagagtttcgtttttgttgtttaggttggagtgtaatggcgcgatttcggtttatagtaattttcgttttttaggtttaagttatttttttgttttagtttttagggtagttgggattataggtatgcgttattatattcggttaattttgtatttttagtagagatggggtttttttatgttggttaggttggtttcgaattttagattttaggtgattcgttcgtttcggttttttaaagtgttgggattataggtgtgagttatcgcgtttggtttagtttattttttttattaataaaataggtttttaagaattggtttaagggtcgggtatagtggtttacgtttataattttagtattttgggaggttaaggtaggtagattatttgaggttaggagttcgagattagtttgtttaatatggcggaaatttcgtttgtattaaaaatataaaaaattagttgagtatagtggtcggtgtttgtaattttagttatttgggaggttgaggtaggagaatcgtttgaatttgggaggtagaggttgtagtgagtcgagattgttttattgtattttagtttgggtaataaaagtgaaattttgttttaaaaaaaaaaaaaaaaaaaaaaaatttggttttaaaattaaagaaatttattatatttttttttttttatatatttttaaggaggatttttagtattatgtaatttttaaaacgttttaaggatttaaaatattttaaaattttagagggtaaggatttatataaaggtgtaatataggattttaatcgttttatttatgtttttttgagatgaagtattgttttgttatttagggtggagtatagtggcgtaattttaatttattataattttcgtttttagggtttaagtgattttttttttttagttttttatgtagttgggattatagatatgttttatcgtgtttatttagtagagatagggttttattatgttgattaggttggtttggaatttttgattttaggtgatttaatcgttttatttcggttttttaaagtgttgggattataggcgtgagtttttacgttcggttagttaattttattgttttttgtagagatgggttttcgttatgttggttaggttggttttgaatttcggattttaagtgattcgtttattttattttttttaaattttgggattataggtatgagttatcgtatttggtttattttatttgatttttaaattttttttgtaaattgataaattttagttgtatatattggtataaagtagttattaatataatatggagtaattaaattaagttaattaatatattattttaaatatttttgtgataagaatatttgaaattttgaaatatataatatattattaattatttttattatgttatgtaatatatattttttatttattatttttttaaaaaaaaatataaaaattggtagggtatagtggtttacgtttataattttagtattttgggaggattagataaggggatcgtttgagttgaagagttcgagattaatttgggtaatatagtaagatttcgtttttataaaatataaaaaattagttgagtatgatggtatatatttgtagatttagtatttaggaggttaaggtgggaggattgtttgaatttaggagtttgagattatagtgagttttattgtgttttagtttgggtgatagagtaatatttcgttttaaaaaaaaaaaaaatataatttattttttttgattaaggttttgttttttttgtacgtttttttatttttttattttatagtttttggtgattattatttttttgtttttgagttttattgtttagattttatatataaatgaatatgagtcgaggttaggagattgagattattttggttaatacggtaaaacgttgtttttattaaaaatataaaaaattagttaggcgtggtggtaggcgtttgtagttttagttatttaggaggttgaggtaggagaatcgtttgaattcgggaggcggaagttatcgtgagttgagattgcgttattgtattttagtttgggcgataagagtgagagtgagatttcgttttaaaaaaaaaaaaaaaaaaagttagtatttttttgtggatttcgtttattaagtagaagagggagagaaaattattataattttattttagtattatttttttttttttcgttttagtgaatttattttaattatttttttaatatcgttttgtagttgttattcgatttttttttgaaataagttttattttaattaagacgggtatttgtaattttttttaaggtttataattaagtttaaataaaaatatgtgtagttttaatttttatacgtataattttttagtagtattgttttttttagattataaagatagatggtatttagatattattttttcgtaaatatttattatttttatatattaatagataagaaaaagtttaatattttattttttatatttaaataaataaattataaaaatatatatttttagtttttgtagtgttttcgttaagtaaaaaaaaaaaaaaaaaaaaaaaaaaataaattcgtatagaaggtggtagtgttgatttatttaaagggaacgaaatatttttatagtattaatattaaatgtaaagaattttaatgaatatatcggttgtattataaaaataatgaagttagttaattattattaggttataatttaattttataaagaagtgaagtagtaaagagttgaagtagaaatgatataggaaaatagtagtaaagtttttgagttttaatagtttattttaaagataaatatattaaagaataaaggtttttaatttatttttttaatggtagggtttgatttagatttttttttgggattttgagtttcgaagtttttaggttcgggattatcggtattttggtatagttcgttgatgatggggttatatatttgttttagttttttttttttgtgtttaaattcgtttttttcggttaaggtgttggcgtttagttacgagatgattttttgatatttgtttagaattttttttttgttcgtttcgttgattttgtttttgagttttttattttttacggcgttttttatgttgaaggcgtaggattttagggcgtttttggttgatattttttcgcgttgtatttcgtttttcgttttgtattttttcgttttttgtattatgcgttcgattttttttttgtttaggcggtttttgtcgttggtgatggtgattttgttggttttgtcggtgtttttgttcgtggtcgtgacgtttaggatgtcgttggtatcgatgtcgaaggttatttcgatttggggtacgtttttgggggtcggagggatgtcgtttagttcgaagcgttttaatagattgttgtttttcgttatggttttttcgttttcgtatatttggattagtatttcgggttggttgtcggagtaggtggtgaagatttgcgtttgtttggtggggatggtggagttgcgtttgattagggtagttattacgttttcggtcgtttttagttttagcgataggggagttacgtttagtagtagtaggttttgtacgttttcggatttgttttttattaggatggtcgtttgtatcgtcgtttcgtaggttatagtttcgtcggggttgatgtttttgtttaggtcgcgttcgttgaagaagttttgtagtagtttttgtattttggggatgcgggtggagttttcgattaggattaggtcgtgaatttgggttttgtttagtttggcgtcgcgtagagttttttttacgggttttagggtgtttcggaataggtcggagtatagtttttcgaatttcgttttggtgatggacgtgtagaagtcgatgtttttaaatagggagtcgatttttaggttggtttgggtgttggacgatagggtttttttggttttttcgtaggcggtgcgtagtcgttttacggttcgtttgttttggttgatgttttttttgtgtttttttttgaatttttttacgaagtggtttattagtttgttgttaaagttttttttatttaggtgggtgttttcggtcgtggtttttatttcgaagatgtcgtcgtcgatcgttaggatggatacgtcgaaggtgttttcgtttaggttaaagatgagtacgttgcgtttttttttgttcgttttgtttaggtcgtaggcgatggcggcggtcgtgggttcgttgatgattcgtagtacgttgagtttcgcgattatattcgtatttttggtggtttggcgttgcgagtcgttgaagtaggtcggtacggtgattatcgcgttggttatcgggtagtttaggtacgtttcggcgattttttttattttggttagtattatggacgagattttttcggggtagaatgttttggttttttttttgtagtttatttgtattttgggtttgttttcgtcgttgattatttggaaaggttagtgttttatgttcgattgtattatcgggtcgtcgaatttgcggtcgattagtcgtttcgcgttaaatacggtgttttgcgggtttagcgttatttggtttttggtcgtattttcgatgagtcgttcggtgttcgtgaaggttacgtagttgggggtggtgcggttgttttggtcgttggcgatgatttttattttgtcgtgttggaatatttttacgtaggagtaggtggtgtttaggtcgatgtcgatcgtcgcggttttggttatgtcggtgttttgttttgtgggtttcgttttgagattgggggttggaaacggcggacgggattcgcgataagagtttagtttttcggaacgtcggaaatttaatacgtcggtgtttgtagtcgtataggttcgttttggaaagttttgggatcgcgggagttattttcgaaagacgaagcggattttcgtagtagttttttaggttggtcgtttttcggatcgcgcgtttttcggtttttataagtcgtcgtggagattcgtttttttttttttgagttaattattaagttcgatgaggttgttaggtcgggaatattttaggggtttcgtttttcgttttgttttttagttttttttggattaattagagggtagggtgtcgttttttgtttagaattttttagagttttttgggatttattggaggggataggggttttgagagaaagggggagtggtggtgggaagggtgttggtttttatggcgatgttggtcgtttgttttttagtaggtaattgataggaagggttcgttttgggcggtgcgagattggtcggatgattttggagataattagaattcgaaagttattttgtttttcgaaggaggcggtgtatcgatgtgtttgggaaattttgattggattgtgtttgtgaaggacggagtagttttgggtttttttttcgaggtatttaatggtttagtttgtttgagaaacggatcggttttttcggatgtttttttcgttttaatgggaaggagaaggaaagagataatgtaatatagtttttgatataatttttaatttataaggatagaataattgggaataggagtttttaaatttttataaggaaagtagttgtgtaaataggtagtttttagtaagataggggtatttatttaaggaggaagggaggcgttggtcgggtaatgggagtagtgggttcgtcgtatttttgttttcgtttttagtcgttttttttagttgtaattaggagttagaaaaaaattttttttagtatgtaggtcgtttttaaggtatttgggatttttttatttttttttttatttttagtttggggtttgggatattttttttttatttttttaatttttggtttatttttggatagtgtgtagaagtaggattttatagtttcgagtaagattttttgtttgtttttgaaatttttaggttgttatcgtttttaggttaaatttaataagatggtgattttgggagggaggtgcggggggtgtttagttttttttaatattatatattatagttgtttggtaggtggttttttttaagtaaattgtgtggagtgatgttggaaagtaggaggggttgggatttaggttttagttattagttttttttaatattttaggttatgtgttttaagtttgttgttttcgttttgagatagtttcgttttgtcgtttaagttggagtgtagtggcgtgatttcggtttattgtaattttcgtttttcgggtttaagtaatttttttattttagttttttgagtagttaggattataggcgtgcgttattacgtttggttaatttttgtatttttagtagagatagggtttttttatgttggttaggttggtttcgaatttttgatttcgtgattcgtttatgttggttaggttggtttcgaatttttgatttcgtgattcgtttatttcgggtttttaaagtgttgggattataggcgtgagttattattttcggtttgttgtttttgtttgtttgttttgagattgagttttattttgtcgtttaggttggagtgtagtggtgagatttttgtttattgtaatttttgtttttggggtttaaataattttgttgttttagtttttttaatagttggaattataggatgtgttattacgtcgggttaatttttgtatttttaatagagatagggtttcgttatgttggttaggttgaatgtgtttaagtttttattttagattttaattttttgcggattttttttttttttgttttaaatacggttgtatttagtaatttattttttttttgttttttttttttatttttagtgtgaatgtaagattttttgttaggcgtttgaaaggaaaatgtgagggggttgaagtaatagtattgtgtttataatttattataaaaaaaaaaaagaaaagaaaaaaaaaatagttttattgttatggcgatattttttgagtataaatgaaaggaagaagttattgatgaaggaataattttgtttttaaatattttgtttaattggtattttttatatgtatatttgtatatatatatttgtttattattaaaatatttttttttggaatttaagggtatttatttgtttataatttattgatttaaatttatgttgtaaataaattgttttaataatatgtgtgtgtttgtatgtgtaggtaggtgataatttttatatttagttttagttttttaatgaattatttttttaaattagttaaatcggttaaattttaggaatttttttaaatatttttttatgaaatgtttggttggagatttttttaaattatgtttattttagttgtatagtgtattaatatttttagagatttttaattttatttttttttttggaaatttttttattattaattgttattattggtaggtttggatttattttttttttttttttaaatttataatttaaaaggttagtatagtggtttatatttgtaattttagtattttgggaggtcgaagtagtagattatttgaggttagaaattcgagattagtttgattaatatggagaaagtcggtttttattaaaaatattaaaaaaaaaaaaaaaaaaaaaattatttgggtatggtggcgtatgtttgtaattttagttatttgggagtttgaggtaggagaattatttgaatttaggaggcggaggttgcggtgagtcgagatcgcgttattgtattttagtttgggtaataagagcgaaatttttttttaaaaataaaatatttttttgattttgttgagaaatataaaaagtggggagtggggggtgggagagggggagaaaaaatttttttattggtatgaagtaaagggtattattgttttaattgtttagtaagtagatgtggtgttgggattttaaattttgggtgttttttggatagtagaaaaatttaatataaatgttgtttttttttaattagttatattagttagagtttatagtgttatagttgatttagtttttaagtgaagtttttgtggattagattggaaatttatatatatatattttttgtttattttttgataaggagagggttatttgaattttttttttttttttttttttttttttttgagatagagttttgttttgtcgtttaggttggagtgtaatggtatagttttggtttattgtaatttttattttttaggtttaagcgatttttttgttttagttttttgagtggttgggattataggtgtatattattacgtttggttaatttttgtatttttagtagagagggggtttcgttatgttggttagtttggtttcgaatttttgattttaagtgattcgttcgtttgggtcgtttaaagtgttggaattataggtatgaagtattacgtcggttttttttttttttttagattggatgttttttaaggtagaaatttagttataagtttaattgttgtttaaggtgaatatataagaattttaggagattttttagaattttaatgtgattaattttagaattaggtttttattggattttgtgtttggaaggattagagtttagagtttttaaagtgaaagttaggttagatgtttttaaagggataagagaattgaagagggagtgttaagaatataattgttatagtagtgtggggtaagatagttttttttaggttgacgttgtagggtttttttttttttttttttttttttttttatagttttttaaatagtagtttttttaattttgtttattttaaaagatggtataggtcgggcgcgatggtttatgtatgtaattttagtattttgggaggtcgagatgggtggattatttgagattaggagtttaagattagttcggtaaatatggtaaaatttttttttttttaaaaatataaaaattagtcggacgtggtggtgtatatttgtaattttagttatttaggagttgaggtaggagaattatttgaatttgggaggtggaggttgtagtgagttgagatcgtattattatattttagtttgggtgatagagtaagattttgttttaaaaaaataataaattaaaaaaaaaagttgttataattttaagtttatttaaatgaatttaaatgaaagtaaaagagttaattgatatgaaatttagaggtaggtatttttaattgaatgaatgataaatgttttaatgataaagagaattttggttatttttagtagtatggaaagaaaaaatttgggaagggaaaattttggatttgtatttgcgttttatttttttggtgaggttgtttttttttttaataaggaagtatttgtatattgattaaataatataagtttcgacgtgtttatttttaaaatataattaataataattgaattgcgtgtggtgatttaggtcggtaattttagtgttttaggaagttaaggtaggtatttgaatttagaagtttaagattagtttgggtaatatagtgggatattatttttattaaaaattttataagttagttgggcgtggtggtaggtgtttgtagttttagttatttgggaggttgaggtaggaggatcgtttgagtataagaggttaaggttgtagtgagttatgattacgttattgtattttagtttgggagatagagattttgtttcgaataaaaaaattttttttttttatatgattaaagagaatatgattttttttttttttttattggggattttatattttcggatatgattcgtagttatttttatttaggtgtttaaaagttggggattattattaggattatagttgtttttagtttaatgtaaaaattgttttaagatttgcgggtataggttatttagttaaatttttttatttttaaagatagtattaaggattaaagaagtttagtggtttgatttggttatttagatgataggttatagaatcggtgattggatttacgggttttgatatttattttgtatttttttttatattggtttattaatttaattgggttttgtttgtttttaattttgtggttagatttaattgttttattttttaaagaggaaaataaatgaatatagtgttggtttttgcgagtattaagggtattacgggtatgtgattagttagggattttcgttttggttgttgttttgtttttcggatttaagattatggtttttataagtttttgttttttttattttttagtttttttagttttgtttttttttttcgatagaatagattgtttaagtagaaagaggggaaaggaggggggagtttcgttattagggtaaggttggtatatagtttatagaatttttcggacgttaaatatagagttttgattaattttgatgttttagggtcggttggcgagaggagggagagattcgggtggcgtagtttgttggggagtgtttttaagaatgatatagtagttttcgttttgaaggttagaaaattttagaaatttcgggtagagttagcgacgggggaaaaagttttagttaaaggggaggaaaggtggggagtgcgggggggggggcggggggagaaaaggcggggtcgttggggtttgagggcggggttggtttcggggttgtttattcgatttttgcgttttttgatgtttttttttttttaaaaagggattaaaggaggaaagaaaggatttttcgagttttttttatattaggtgatttataagacgaaaatattggagaattttgtaatttttatataattaaattagatgtattgggtggttagaggcgagaagagaaggtttttatcgtttacggttagcgcgtattcgtttgcgcggggacgcgcgattgatgggagagtaggggatggagtcggttggtttttgtttatagttagtttagcgtttcgttttagtttttcgtttcgtgaggtattaggagagtaagaaaattagatttttaggagtgattttcggttgttgggttttttcgtagttttagtttgtgaatttgttttagtttttttttggtgtttttttttttaattttttttttttttatttttttttgaggtagggtttcgttttgtcgtttagattggagtgtagtggcgtaattacggtttattgtagttttaagcgattttttcgttttagtttttcgggtagttgggattttaggttcgcgttattacgttttgttttttttttttttaatttttgatcgggttggacgtgggttagcggggtggggcgggtttaatttcgtgtttggaatgtttcgttgttttattttttaaatatttttttaaatggtggtgttaggaaaggacgagggttcggtgggtttattttttttggttgaattatatttgatagatattttaggggcgttttttaaggggatggatttagattagttagtaggaggaatggtggttgttataattttttatatttacgtaaggatcgtttttttagaaatcgttaatattggtttttttaagaaataattttatttttttttttagtttaaagtcgtattatttttgtttattttttttatatttataaaatattgtagttaattttttgttttggtattttttttgtttttttgaggatgataagaatttttgaagattaggaataatagtaagtgtatatgttataaaataaaattttgggtttaaagttatataaaattaaatttattattatagtttgttgttttttgaggtttggtataggaaggtaggaggtgattggaattgagaagatatttatatttgtttttttatatttgtagttattttttttgttgtattttttttttttaaagtttttttgttttttaaaatattatttcgtttatgggtggtattgtattttttttgttaattttatagtttttttaacgtttttttttgaggttataaagtgaatattttaaggtatagtattttgtgttagggtatgtaggtaaataattttttttttttttttttttttttggagacggagttttgttttgtcgtttaggttgtagtgtagtggtacgatttcggtttattgtaatttttatttttcgggtttaagtgagttttttgttttagttttttgagtagttgggattataggcgtttattattacgtttagttaatttttgtatttttagtagaggtggggttttattattttggttaggtttgttttgaatttttgatttagtgagttattcgtttcggttttttagagtgttgggattataggtatgagttattacgttcggtcgataagtaataatttttatatattttttgttaaaatatttattaataagtttgatagggttataggaatttttttattgtttttatttaatgttatgtttgatgatttttttattgtgttaataaaggtatttggtaggtttttttttatttttatttttttttaattatttttttttttattttatgttatagtagtggtagttgtttttggtttagagttattatagggtttgtagattagagttataaatgttattgtagttttgaaggggagaggaggttttatagtaaaggtatatttttatgaagattgatttatattgtggttagagtttatagtattatagtttaattattataagagataaatgtttttttgtagattggtttggaaatttaagtattttatatttattttttatttttaaatttttaaagtaaggtttatttttatgtattattttttataatattggattttttttattaataagtatttagtgaatggtttgatgggttttgaggtatatataagtttataaagtgttttaatgtaatattgatataattgattttttttttttttttttttttttagagatagggttttattttgttgtttaggttggagtgtagtggtatagttatggtttattgtagttttgatttttataatgttatgtaatcgttaattttggttttaaaatatttttatcgtttttagatattatttatttatttatttattgagatagaattttatttattgtttaggttggagtgtaatggtacgattttggtttattgtaatatttattttttgggtttaatcgatttttttgttttagttttttaagttgttgggattataggtgttcgttattacgtttagttaattttttgtatttttagtagagatggggttttattttgttggttaggttggttttgaatttttgattttaggtgatttatttatttcggttttttaaagtgttgggattataggtatgagttattgcgtttggtcgatataatttttattttttgagatggagtttcgttttgttatttaggttggagtgtagtggcgtaatttcggtttattgaaatttttgtttttgagtttaaacgattcgtttgttttagtttttcgaatagttgggattataggcgtatattatcgcgtttggttgatttttgtatttttagtgtaggaggtgggtggtggggggggtttttattatgttggttaggttggtttcgaatttttgattttaggtgattcgtttgttttagttttttaaagtgttgggattataggtatgagttagtacgttcggttagatataatttatttttaaaagggtttatttcgggagttttaaggattgtagtgggcgttttttaaggaggagggaattatttttaggatgttagcggttggggtatgaagtatttttaagggaaagtgtatgggagtgaagtttgtaggtttttttggttcgggtgtttattggcgtatttaaattgtaggtgataattgttaagaatgtgatatttttattttagtatgtttttagttatgagagaggtatcgagttaaatttttttattttaaaagatgataattaaagtatatgtgtataatttagtaagttagtgaatgtattcgtttttttattttgaaatttaggatattttttttattttatgttgaatttagattaagtattaagtttatgagtatattaggtgtatttataggaggtaggagcgttggttttttatttaattgtattttttttgattatttttgtagaaatattttcgttttttttttattttttttgagattaattttatataaatattattttaaggttatttttttaggtgttaaattttttttgtatttttaggttaaatttaattagtattaataaattttatttttttgtgtgtgtgtgtgagacggagttttgttgtgatgtttaggttagagtgtaatggcgtgatttcggtttattgttattattgttttttgggtttatacgatttttttgttttagtttttttgggattataggtacgtattattacgtttagttaatttttgtgtttttagtagagatagggttttattatattggttaggttggtttggaatttttgattttaagtgattcgtttattttagttttttaaagtgttgggattataggtttgagttattatttttggttagaattaagaagttttattggaggatattatttgtttaatataaatggattatattataatagttatatttttgtaaaatttgtttttattggaagtaaaaatgttattttattttagacgttatgggaaaaataatttatgtagattttattgatttttaaataaaggaataaaaggtattatttgaattttaaagtttatttattttgaagtaattaatttaaaaaatggtttgagttaagtgtattaaaaagaagaaatagtcgtaagatggtagtataaatttatttttgtatgtagaaatcggaaaaaaagtaagtttagtattttattaaaaaattttaatattgtaaatataggaaattgagaattgataaatagaaatattaggaaatgtaaagttttgaagttttaaaataaaaatagtaattttggaaaggtttttaatttatttttttaatggtggggtttgatttagatttttttttgggattttgagtttcgaagtttttaggttcgggattatcggtattttggtatagttcgttgatgatggggttatatatttgttttagttttttttttttgtgtttaaattcgtttttttcggttaaggtgttggcgtttagttacgagatgattttttgatatttgtttagtattttttttttgtcggtttcgttgattttgtttttgagttttttattttttacggcgttttttatgttgaaggcgtaggattttagggcgtttttggttgatattttttcgcgttgtatttcgtttttcgttttgtattttttcgttttttgtattatgcgttcgattttttttttgtttaggcggtttttgtcgttggtgatggtgattttgttggttttgtcggtgtttttgttcgtggtcgtgacgtttaggatgtcgttggtatcgatgtcgaaggttatttcgatttggggtacgtttttgggggtcggagggatgtcgtttagttcgaagcgttttaatagattgttgtttttcgttatggttttttcgttttcgtatatttggattagtatttcgggttggttgtcggagtaggtggtgaagatttgcgtttgtttggtggggatggtggagttgcgtttgattagggtagttattacgttttcggtcgtttttagttttagcgataggggagttacgtttagtagtagtaggttttgtacgttttcggatttgttttttattaggatggtcgtttgtatcgtcgtttcgtaggttatagtttcgtcggggttgatgtttttgtttaggtcgcgttcgttgaagaagttttgtagtagtttttgtattttggggatgcgggtggagttttcgattaggattaggtcgtgaatttgggttttgtttagtttggcgtcgcgtagagttttttttacgggttttagggtgtttcggaataggtcggagtatagtttttcgaatttcgttttggtgatggacgtgtagaagtcgatgtttttaaatagggagtcgatttttaggttggtttgggtgttggacgatagggtttttttggttttttcgtaggcggtgcgtagtcgttttacggttcgtttgttttggttgatgttttttttgtgtttttttttgaatttttttacgaagtggtttattagtttgttgttaaagttttttttatttaggtgggtgttttcggtcgtggtttttatttcgaagatgtcgtcgtcgatcgttaggatggatacgtcgaaggtgttttcgtttaggttaaagatgagtacgttgcgtttttttttgttcgttttgtttaggtcgtaggcgatggcggcggtcgtgggttcgttgatgattcgtagtacgttgagtttcgcgattatattcgtatttttggtggtttggcgttgcgagtcgttgaagtaggtcggtacggtgattatcgcgttggttatcgggtagtttaggtacgtttcggcgattttttttattttggttagtattatggacgagattttttcggggtagaatgttttggtgttttttttgtagtttatttgtattttgggtttgttttcgtcgttgattatttggaaaggttagtgttttatgttcgattgtattatcgggtcgtcgaatttgcggtcgattagtcgtttcgcgttaaatacggtgttttgcgggtttagcgttatttggtttttggtcgtattttcgatgagtcgttcggtgttcgtgaaggttacgtagttgggggtggtgcggttgttttggtcgttggcgatgatttttattttgtcgtgttggaatatttttacgtaggagtaggtggtgtttaggtcgatgtcgatcgtcgcggttttggttatgtcggttttttgttttttgtcggttcggttttgagattgggggttggaaacggaatattggattcgcgagaagagttcggttttttcggacgtcggaaattcgacgcgtcggtgtttgtagtcgtataggttcgttttgggaagttttgggataacgggagttattttcgaaaaaggtagtggattgtcgtagtagttttttaggttagtcgttattcggatcgtttgtttttgggtttttataagtcgttacggagattcgtttttttttttttgagttaattatcgagttcgatgaggttgttaggtcgggaatattttaggggtttcgtttttcgttttgttttttagttttttttggattaattagaggttagagtgtcgttttttgtttagaattttttagagttttttgggatttattggaggggatagggattttgagaggaagggggagtggcggtgggaagggtgttggtttttatggcgatgttgatcgtttgcgttttagcgtttaattgataggaagggtcggcgttgggtttttaattgtgggggtttgttgggtttgcgtagttgtgggtagggggttggtgcggggagcgggttacgcgcgtttaggggagggtgggggcgtttgtgttgatatcgttcggttacgttataatggagatattgtttttgattttatgggttagtttggaaaaagattattgagttggagtcgttttaaatttgtagggagggacggggtggggggtggggggatttcggttgtgtagtttgatattgagggagtttttatttattcgttggggttgcgtaatttggacgtttttaaattgaagcgaaggcgtcgggagattaggtgagttagtagggatttgattgattgtgaatttgaaaggtttagtaggtttttgtttgggaaagtattggaaagttttttagttggtttaagtttgaggtatgtgggcgttggttgattcgggtaggaggagtatttggggaaagttaagatggttttagattgattggtcggagtagttagaatgggggaggcgggggaagggagtgcggtttgtcggggaaatggggaggcggggaaggcggggtaagggggaggcggggtaattgggaagcgggggaaagggagtgcggtttaggaatttgcggtgtggagagggatagatattaaattttttattttatttttatttatttatttttaatttttttttttttttgagacggagtttcgttttgtcgtttagggtggagtgtagtggtacgattttggtttattgtaagttttgtttttcgagtttaggttatttttttgttttagtttttcgagtagtagggattgtaggcgttcgttatcgcgttcggttaattgttttatttttcgggtttaagttatttttttgttttagttattcgagtagttggaattattggcgttcgttattacgtttagttaattttttttattttttagtagagacgaggttttatcgtgttagttaggatggtagttaggatggtttcgtttttttgatttcgtgattcgttcgtttcggttttttaaagtgttgggattataggcgtgagttatcgtttttcgtttttaaattttttattgattagttattggttttagaaaataggagttttatttaggagaaggatatagatattgtttggagtgttatgtcgtttgagaaaattggaaggtttgtggttttttagtagttatttttagtttgattggaatttattgtcggtgaatttttaatagagaatattattttaggaaggtagtagaatttaagtgtggaggttgatgttttttgaagagattagaatgtatattatttttgggttataaagagatagaattttatagtaaaatatataggaataggatagtagaattaggttatttgggaaattgaaaataatatatagttatttgttttttaatttttttgagtagttgagaatatttttgtttattttgtttaaaaagtagtttgttatgatagtagcgtttttatgtatttgtataggtttgtttatagtaatattattttgtaaattttgtaatttgtatttatcgagagatagataagtaaaatgtatataggtcgggtgcggtggtggtttatgtttgttattttagaatttagggagatcgaggcgggcggattatttaaggttaggagtttgagattattttggttaatatggtgaaattttgtttttattaaaaatataaaaattatttgggcgtggtagtgtacgtttgtagttttagtttttcgggaggttgaggttggagaattagtttgaatttaggaggtggaggttgtagtgagttaagattatgttattgtattttagtttgggtaatagagtgagattttgttttaaaataaaattaaaaatagtggtatataaatatgaatattatttagttttaggaaggaaattgtgatatgttataatatggatgaaatttgtgtatataagttaagtgatataagtaaagttataaaaggataaatattgtataattttatttatatgaagttataagagtagttaaatttatagagatagaaaaaagaggtcgggcgttttggtttaagtttataattttaatatttggtgatttggaggtgggaggaggtttttttgagtttaggagtgagaaattagtttgggtaatagggagatttggtttttataaaaaaataaaaaattagttgggtgtggtggtatttatttgtggtttaagttatttgggaggttgagataaaaggattttatgagtttgggaggttaagattgtagtgagttatgattatattattgtagtgtagtttgcgtgataaaacgagattttgtttttaaaaaatgagaaaaaaaaatgtttgttattaggcgataaagggaggggaaaacgggagttatttaatgagtatatagttttagttttgcgagatgaatagaattttggaaattggttgaatatcgttgtgattgaatttattattaaattttatatttaaaaatggttaagatggtataatttgtatgtattttattataataaaaaataaaaaataggttgggcgagatgtttatttttgtaattttagtatttggggaggttggggttgaaggatcgtttgagttttgaaggagtttgagattagtttgagtaatataaggagattttatttgtatataaaattaaaatattagttaggtagagagttggttacggtggtttacgtatgtaattttagtattttgggaggtcgaggcgggcggattatttgaggttaggagtttgagattagtttggttaatatagtgaaatcgtgaaattttatttttattaaaaatataaaaattagttgggcgtggtggtgtttttataattttagttattcgggaggttgagataggagaatcgtttgaatttaggaggtggaggttgtagtgagtttagattatattattgtagtttaaagtaagatttcgttttaaaaaaaaaaaaaattagtcgggtatgttgtttttagttattttggaggttaaggtaggaagattgttggagtttaggagattaaagttgtagtgagttatgattgcgtttttgtattttaatttgggtgatagaggaagattttgttttaaaaaaataaataatattgaaaagtatttttttaaaatagtattttattttttttttataggttttagagaattatggttattgttaagggaatcgttataggtatcgatttgggtattatttatttttgtgtgggggtgttttagtacggtaaggtggagattatcgttaacgattagggtaatcgtattatttttagttacgtggtttttatagatatcgagcggtttattggggatgcggttaagaattaggtagtaatgaatttttagaatattgtttttgatgttaaacgtttgatcggtaggaaatttaatgattttgttgtataagtagatatgaaattttggtttttttaagtgattaatgaaggaggtaagtttaaagtttttgtgttttataaaggggagaataaagttttttattttgaggaaattttttcgatggtattgattaagttgaaggagattgttgaggtttttttgggttattttgttattaatgtagtgattatcgtgttagtttattttaatgatttttaacgttaggttattaaggatgtaggtgtgattgttggatttaatgtgttaagaattattaatgagtttacggttgttgttattgtttatggtttagataaaggaggttaaggagaacgatatgttttgatttttgatttgggtggaggtatatttgatgtgttaattttgattatagatgatgggatttttgaggtaaaggttattgttggggatatttatttgggtggggaggattttgataataggtttgtgagttatttcgtggaggagtttaagaggaaatataaaaaggatattagttagaataagcgagtcgtgaggcggttgcgtatcgtttgcgagagggttaagaggattttgtcgtttagtatttaggttaatttagaaattgatttattttatgaaggtattgatttttatatatttattattagagttcgatttgaagagttgtgtgtagatttgtttaggggtattttggagtttgtagaaaaagcgtttcgggatgttaagatggataaggttaaaatttatgatattgttttagtagggggttttattcgtatttttaaggtgtagcggttgttttaggattattttaatggacgtgattttaataagagtattaattttgatgaggtcgtagtatatggggttgcggtataagtagttattttgatgggggataagtttgagaaggtataggatttgttgttgttggacgtggtttttttgtttttggggttggagacggttgggggcgtgatgattgttttgataaagcgtaattttattatttttattaagtagatatagatttttattatttattttgataattaattcggggtgttgatttaggtgtatgagggcgagagggttatgataaaggataataatttgttggggcggtttgatttgattggaatttttttagtatttaggggagttttttagatcgaggtgacgtttgatattgatgttaatggtatttttaatgttatagttatggataagagtatcggtaaggtgaataagattattattattaatgataagggtcgtttgagtaaggaggagattgagcgtatggttttggatgttgagaaatataaagttgaagatgaggtttagagggagaaaattgttgtaaagaatgttttagaattttatgtttttaatatgaagagtgttgtgagtgatgaaggtttgaagggtaagattagtgagtttgataaaaataaaatattggataaatgtaacgagtttttttcgtggttggaggttaattaattggtagagaaagatgagtttgattataagagaaaggaattggagtagatgtgtaattttattattataaaattttattaaggaggatgtattgggtttgtttgcggaatagggtatgtgtttggaaggtttgttataggttttataattgaagaagtagattaattttttttagaattgaagtattttaggatgtttttatatgtattttattttttttatttttaaatattattattatttttgattagatttgaatttaagttattattttttggaaattttggagaaggagttttatgtattatttattatatttttttatattttgtttttgattttggaatggatttaggaaaattaggtttttttttaaatcgtgtgatgtatttgaatgtttgttatttttagttattttaatatttttttttttgtgtggatgtttatttgttaattagtaaatttgttcgtaaagaaaattatttttggtatttaggttgtgaatgtattttgaaggggagagtttatggagagagtatgtgttttttgattgtgaggttattgtgaatgattaaattggtaagggtaaagtatttgaatttttatgaatttattttgtgtgtgtgtgtgtgtgtgtgtgtgtgtgtgtgtgtgtgtgttttgagagatagtttcgttttgttatttaggttggagtgtagtggtataattttagtttattgtaagttttgttttttgggtttacgttatttttttgttttagtttttcgagtagttggtattataggcgttcgttattatgttcggttaattttttgtattgttttagtagagacggggttttattgtgttagttaggatggtttcgattttttgatttcgtgattcgttcgtttcggttttttaaagtgttggaattataggcgtgagttatcgtgttcggtttatgaatttattgttttaattagttatataatttttgatttttagatatttttagtatagatggaatagatggtaaattataattgtttttaattagttataagttggttttggagtttaggatttaattgggggtggagggataaattttgtttgatgttttgatgttatttataggtaaggtttaggagatttagtatttatgtatttatagagtttattgtttatatttattatatggagaaaatattttttttttttttttttttttttggaaatagtttcgtttttgtcgtttaagttggagtgtaatggtacgatttcggtttattgtaaattttgttttttagatttaagcgatttttttgttttagttttatgagtagttgggattataggcgtttattattatgttcggttaatgtttgtgtttttagtagagatgggattttattatgttgattaggttgttttgaatttttgattttaggtgatttatttattttagttttttaaagtgttggaattataggcgtgagttatcgtgtttagttttagaaaatatttttataataaatttttgataaataagtatgtttatgtaagatgataaatataagttttatgaagttttagtttatgaaaaaatatttttattagttgggtatagtggtttacgtttgtaattttagtattttgggaggtcgaggcgggcggattatgaggttaagagattgagattattttgtttaatatggtgaaatttcgtttttattaaaaatataaaaattagttgaggacggtgatgcgtgtttgtagttttagttatttaggagggtgaggtagaggaatcgtttgaattcgggacgtggaggttgtagtgagttgagatcgtggtattatattttagtttggtgatagagcgagattttattttaaaaatattttttttttttatttgtgttttaatatatatttataaaaatttgggggatatgagttagaataatatgtaattgtatttttgtttgtttgtgtttgaaatatttaatagtgaaatgttagattgggttatttgtatttgtgagttatagtttttttagttttatatagttttttataggatagttttggtaaaagtgtgtaagaaatgcggagattgaggttggtttttttggagaaatgtatttattggtaatttttgataaaattaaaatttgtgttttagtttttttttatttttgggattgtttaacgtttgtttgtttataatttttttttttttagagagagtttcgttttgttatttaggttggaatgtagtggggagattgtagtttattgtaatttttgggtttaaatgatttttttgttttagtttttttaaatgttgggatttataggttttaatattttttgttttttgggatggagttttgtttttgttgtttaggttggagtgtaatggtaagatttttatttattgtaatttatgttttttggatttataggcgcgtgttattatattcggttaatttttgggtttttagtagagatagaatttcgttatgttgattaggttggtttcgaatttttgattttaggcgatttatttgttttggtcgtttaaagtgttgggattataggtgtgagttattgttttcggttatttttttttttttttttttttgagacggagttttgttttgtcgtttaggttgtagtgtagtggcgcgatttcggtttattgtaattttcgttttttaggtttaagcgattttttttttttagtttttcgagtagttggtattataggagtttgcgattacgtttaattttttttgtatttttagtgaagatggggttttattatgttggttagattggtttcgaatttttgattttatataatttatttatttaggttttttagagtgttgggattaaaggtttgagttacggttttcggtttttttttttttttattagttgaatttaagatttaaaatattttttaattttattttttaaattttatgtttttattttaataaatatagaaaagtgtatattttataattttaataaattttttataattttcgataggaagtgtgtgtagggtataaatatattacgttgtagatggtaggattttggaaaagaataaaattttttgagtttaggcgttgagtttcgttattcgtttggtagtttaggttagggttcgcgtttgcgtaatgggagtcggtcggttagggaggaagtcggaatgaaggaaatttcgtttttttttcggttttttttttttttttattttatttagtttgcgttttttagtcgtaagtcggtcgcgttttgttcgttagcgtttggagttttttgcgtcgtttttcgttgcgtttgcgcggtttcgtttcgttttacgcgcgggttcgcgtttcggtttttttagatttgttcgtagtattttgttgttttttcggttcggttcgttgttcgcggcgttagtattatggtgggtatcgtgacgttaaaagggggcgttttcggggatttcgtatggttggggcgggggatttggtttttgtatttttaggttggagttaggttcggagtttttatttttatttttagtattgtattgttttttaggtttattgaggaggtattgagaataaatgggatattttttttatgatgagggaaaaaattttaattttgagagagatttagtgaggatagcgggagacggaaaagttagattttagagtatttttttgttaggtaagtttcggtagggtgcgggtgggatattttttataatttattgaaaggagtgggtaggtattcgagaaaggtggtcgattgagagagtatagtggggaggtcgacgtatgtagggtagagtttttttgggattttaagtgatgggtttagtgtagtgtgtagaataatttgggttttagttttttagttttgttaattaattatttttttttgtgaaattttgagaattgttagggatgtagtggggtttataatattagtatttggtaatattgttaaaggatatttttttttattatgtttttttttatatgatggtttttttttttttttttaatagtttttttattttttttttaagttttttgtgggtaaggatgtggtcgtggaattaaagaatgatttgaggtaggtatttgttttaataagtttgttgggggtgggtgtgtttagggttttggaatttttttaatttgagaaatattttagggttaggcgaggtggaagatgtatagaagaaataaatggatagggtgtagtggtttaagtttgtaattttagtattttgggaggttgaggaaggaggaaagtttgagtttaggagtttgaggttgtagtgagtagtgattattttattgtattttagtttaggtaatagagtaagattttatttttaagaaaaattttaaaatttagtaataaataaatgttttgtgttttaaatttatagataagtttagagattgtatcgtgtattggaaaataatataaagtaatatatagtttaaagagtaaatataggttaggcgtagtggtttacgggttggacgtgtggtttatgtttgtaattttagtattttgggaggttaaggtgggcgaattacgaggttaggagtttaagattagttcggttaagatggtgaaattttgtttttattaaaaatataaaaattagtcgggtacggtggttggtgtttgtaattttagttattcgggagggtgaggtaggagaatcgtttgaatttgggcggtagaggttgtagtgagttgagattatattgttgtattttagttgggtgatagagtgagattttgttttaaaaaaaaaaaaaaagtaagtattaggttggttatggtggtttatatttgtaattttagtattttgggaggttgaggtaggaggattatttgagtttaggatgtcgagattagtttgggtaatatagtgatgagatttttatttttataaaaaattagttaggtgtagtgtatatgtttgtagttttagttattcgggaggttgaggtgggaggattatttgaatttaggaggttaaggttgtagtgagttatgattgtattattttattttagtttggttgatagaggaagattttgttttaaaaaaagaataggttaggtcgggcgcggtggtttacgtttgtaattttagtattttgggaggtcgaggtaggcggattataaggttaggagattgagattattttgtttaatatggtgaaattttgtttttgttaaaaatataaaaaattagttaggcgtggtggtatgtttttgtagttttagttatttgggagtttgaggtaggagaatggcgtgaatttgggaggcggaatttgtagtgagttaagatggtgttatcgtattttagtttgggtgatagagtaagatttcgttttaaaaaaaaaaaaaaaaaaaaagaaaaaaaagaataggttataggttgggtacgatggtttatgtttgtaattttagtattttgggaggttgaggcgggtggattacgaggttaagagagcgagaatagtttggttaatatggtgaaattatgtagtgtatttaatatttagtataggttagttatatgataggtgtttaaagaaagaaaaataatattcgaagacgtattgattaattattattttgaatatatttattgattgattttttaaatattgttaagtaatatatattattgttgttttatacgaggaaattgaggtttagattagttatattatttgtttaagtttataaaattagtaagtgatataattgaaatatgattttgtttagttttttttttttttttttttttttttttgagatggagttttagtttgttatttaggttggattgtaatggcgtaatttcggtttattgtagtttttgttttttgggtttaagtaattttttgttttagtttttttagtagttgtgattataagtgtttattattatgttcggttaaattttgtatttttagtagagatggagttttattatttaggttaggttggttttgaattttcgattttgtgatttatttgttttagttttttaaagtgttgggattataggcgtgagttattgcgtttagttttatttttttttttaaaataatatttatttatttaaaaattagagatagtgttttattttgttgtttaggttggttttaaattttttgagtttaagtagtttttttgttttagttttttaaagtgttggggttacgcgtatgagttagtatatttggttttgtatttatttgtatagttttttaaataatatgtatatttaggttagatgcggtggtttatatttgtaattttagtattttgggaagtcgaggcgggtggatgtttgaggttacgagtttgagattagtttggttaatatggtgaaattttatttttattaaaaatataaaaattagttagatgttgtgttgtgcgtttgtaattttagttgtttaggagtttgaggttggagaattatatgaattcgggaggcggacgttgtagtgagttgagattaggttattgtattttagtttgggcgatagattgagattttattttaaaaaaaaaaaaaaagtatatttaaaatattgatatttgttattttattattttttagaaagatgggattaattgtattttttttttaaaagcgttttttatatttatttttttgagatgggggttttattttgttgtttaggttgtagtgtagtggtattattatagtttatttagttttttgaatagttggggttatatgttattatgtttagttaattttttaattatttggagaggtagagttttattgtgttgtcgaggttagtttgaaatttttgggtttaagtagttttgttattttggttttttaaagtgttggaattataggtgtgtgttattgtgtttggttgttttttatatttttatgtgagataatttttttatgggttatacgttgatagggtagggaatggtgaggagagggatttaagggtttttgcgttttagaatataggtttttatttgtagtattggtaatgtaagtgatattgatgtgtatagattggggttatagagtaagataagtacggtaattattattagttttaggtaatttggtgtgatgatttgtttttgatttttttttttttttttttttgggttttttatatgggaagtttaattgttgtgttataattttaggttttaaagtatttttattttttttattttattttgtttttgagatagagttttgttttgtcgtttaggttggagtgtaatggcgtgatttcggtttatcgtaatttttgtttttcgggtttaagtgatttttttgttttagtttttttggtagttgggattataggtatgcgttataacgtttggtttattttttgtatttttagtagagatagggttttattatgttggttaggttggttttttaatttttgatttcgtgatttgtttattttagttttttaaagtattgggattataagtgtgagttattgtattcggtcgtagtaatattttttttttttttttttttttttttttttattgagacgagtttcgttttggtcgagtttacgttaggttggagtgtagtggtgttgtaattttcgattttttggtttaagtgattattttgttttagtttttcgagtagttgggattatatgtatgtattattacgtttagttaatttttgtatttttagtagagaaggggttttattacgttggttaggatggttttaattttttgattttgtgatttgtttatttcggttttttaaagtattgtgattataggtgtgagttattgcgtttagtttttttttttttttatttatttatttatttttgtttgagatggggttttattttgttatttaggttggagtgtagtggtatgatttcgggttattgtaatttttgttgtttgggtttaagtgatttttttgttttagttttttaagtagttgggattataagtgtttgttattatatttggttaatttttgtatttttagtagatatcgggttttattattttcgttaggttggttttgaatttttgatttcgtgatttatttgtttcggttttttaaagtgttgggattatagacgtgagttattgtattcggtttttttatattatttttaaaattttttatagagatagagtttcggtcgtgttgtttaggttggttttgaatttttggatttaagtgatttttttattttagttttttaaagtgtagtgattataggtgtgagttaatatgtgtgtggttttaaagtgatttttttgttgggatgagaaagaagatttttttttttttttttttttgagatagggttttattttgttgttttggttggagtgcggtggcgcgattttggtttattgtaatttttgttttttgggtttaagtgatttttttattttagtttttcgaatagttgggattatcggtgtatgttattatttttagttaattttttgtatttttagtagggatggggttttattatgttggttaggttggttttaaatttttgattttaagtgatttttttgttttagttttttaaagtgttgggattataggtgtgagttattacgtttggttaaaagtttttttttttatgtttgttgttagattatttttgtgttatgtatttttttttttttaagggatttaataaaatgatattattttgtataatttttaaatgttattttattgttggagatggtggggtgttgttaaatgttttttagtagttagtaatatggtgagaatattattgaggtagtgggttttagatattgggtgtttgtttttgtttttgttattaggtagagatttattttttgttttaaaaaaaataatgattgtttagtattagtttatttaaattaattttttagagtatatttaagtgggtttttttttttttttttttttttttgagatagatttttattttgttatcgaggttggaatgtagtggtatgattttggtttattgtaatttttattttttgtgtttaaatgattttcgtgttttagttttttgtatatttgggattataggtatgtattatatatagttaatttttgtatttttatattttatttttaaattttttttttttttttgggtttaagtgattttcgtgttttattttttgagtagttgggattataggtgtatattataatgtttagttaatttttgtatttttttttttttgagacggagttttgttttgttatttaggttggagtgtagtggtgtgattttcgtttattgtaagttttgttttttagtttacgttatttttttattttagttttttaagtagttgggattataggtgttcgttattatgttcggttaattttttgtatttttagtagagacggggttttatcgtgttagttaggatggtttcgattttttgatttcgtgatttattcgtttcggttttttaaagtgttgagattataggcgtgagttattacgttcggttaatttttgtatttttagtagagatggggattcgtcgtgttggttaggttggttttgaagttttggttttaagtgattcgtttattttggttttttaaagttttgggattataggtatgagttatcgtatatggtttagacgttgggttttaaagatttttagaattttataaaaattggggtagagaattgttaattttatttttggtaagataaggacgtttttaaaattgttatttattacgattatttttatttatttattttttttgagatggagttttattttgttatttaggttggagtgtagtggttcgatttcgttttattataatttttatttttcgggtttaagtgatttttttgttttagtttttcgagtagttgggattataggcgtttgttattatgtttagttaattttttgtatttttagtagagatggggttttacgatgttggttaggttggtgtcgaatttttgatttcgtgattcgttcgtttcgttttttttaagtgttggaattataggcgtgagttatcgtgttcggttatagttattttattttataattttaaaatagagatgaggttttgttatgttgtttgggttgttttttagttggttttaggcgatttttttgttttagttttttagaatgtttggattataggcgtgaataattatttttagttaaaggttgtttttttaaatttttgtattatttttttaaagagtattggtgttttgatagtattttttaaatagtattttaaggggttcgaggattggggaatggagaggatattatttatgtttgtattattaagagtaatgttatttatttttatttatatatgggttttggttttaaagtaataaatgtttgaaaatagttagtttgggtgatatttatagtgagattttttttttataaaaaaaaaaaaaaaaagtcgggaatggtggtttatgtttgtaattttagtattttgggaggttgaggtgggtagattatgaggttaggagatcgagattattttggttaatacggtgaaatttcgtttttattaaaaatataaaaaattagttaggagtggtggtcggtatttgtagttttagttattcgggaggttgaggtaggagaatggcgtgaatttgggagatggagtttttagtgagtcgagattgtgttattgtattttagattggtcgatagagcgagattttattttaaaaaaaaattagttgggtatggtggtttaagtttgtaattatagttatttaagtggttatagtgagttatgattacgttattttattttagttttggttatagagtgagattttgtcgtaaaaataaaaaaaaaatagttgatggttttgggagttatatagatttggattgaagtttttatttgttttaaatttataaagtttaaaataatttttttgagtttttggaaggtaataattattttgaaagatggttgtaaagattataaatattatatagaatataggtttagtttttattagttgtttaatggtagttgttaagaataggttggtttggtcggggatagtggtttatatttgtaattttagtattttggggagttgaagtgggtagatcgtttgagattaggagttaaggaatagtttggttaatatggtgaaattttatttttattaaaaataaaaaattagtcgggtatgatggtatgcgtttgaagttttagttatttaggagattgaggtaggagaatcgtttgaatttgggaggtagaggttgtagtgagttaagattatattattgtattttagtttggttgatagtgagattttattttaaaaaaaaaaaaaaaaaaaaaaagaatggattggtttagggagaggagatgtggggttgaaaataaattattttgttagttgttttttttattttagggtttaggaatgtttttttttggttttattttttttgatatttttaagtttttgattttttttagttatgtttttattttagttttgaagttatttttatgttgattttgttataaattaatttgatttttttttttttttgtttttgatagtatttgtggaattttttattttgtggattaggtgagatatagtacgggttttagaattggtttttggagaaggagaggggagatttaagggttgggtttttatattatgtttttagggttaataatggtgttcgtcggttaggtacggtggtttacgtttgtaattttagtattttgagaggtcgaggtttgaggttaggagtttaagataagtttgataaatatggtgaaatttcgtttttattaaaaatataaaaaattagttgggcgtggtggtgggtatttgtaattttagttagtcgagaggttgaggtaggaaaattatttgaatttaggaggcggagattgtagtgagtcgagatggtattattgtattttagtttgggtaataagagtaaaatttttgttttaaaaaaaaataataataataataatggtgtttattttttttttttagtattttaatattaaattaattgatattagtgttatagattttgagaaatatttttatatggtgagttggggtttgtggagaagaggaaatatttttaaagtaggaggtttttgggtggttagaggatatttttaagggtgtttttatatttgtttatttttgtttagttattagtgaagaattgttttattcggggtttagtggttcgatacgtgtagttgttagtagatgaggtcgatatatagttgttataggatgcggtaaggaaggaagttttgtagtagaaatagtgatggttttttttttttttttttttttttttttattggtgatttataattttaagttttagtttagaatttttaatttttaatatttgaaggggttttgtttttttattaatgatggttttgtgggttttttttaagggatgagtggatgagaggagtaatagggaatagttatttttttttgagaaggggaggataagtaggttgggaaattttaaagtttttttagtttttagtatttgttttttttattatttttttggagatggtaggagagttttttaggtttttttagggtagtatgtgatttatttggggatggaaggaatttgtttcgtatcgggaataaaatttatgatgtaaatttgtgttttggttttgttattatgtgttgggtagggggttgggatatggaaaaggatgtcgaatttatttaagtttttgttattttgcgttaatttagttaagaatttaatttagttttttattattttttttggtataaagtatataatatagttgttttatattatgtttttttaatatgtttttatttgtatgttttttttgtggttttttgtttatattatatttgtaattggagtgtttgttgtttttttattaatgtgatagtgtcgtaagatatattttatgttattagattttattaatttaattaaattagtttatgttttttgaatatgtatagaagataaatataagtgatgtaatttatattttagagaaaagttgtgattgggaattattaaattttatttatttatttagtaaatatgagtttatgatatagatgagattttttagttttaagggatttttagagattatttagtgtgatttttttttttgtttttgagacgggagttttattttgttgtttagggtggagtgtattggtttggtttggtttattgtaattttcgtttttcggtttaagcgatttttttgttatagtttttgagtagttgggattatagatgtttattattatgttcggttaatttttttttttttttttttttttgagatggagttttattttgttatttaggttggattgtagtggtgtgattttagttttgtaattttcgttttttaggtttaagtgatttttttgttttagttttttaagtagttgggtttataggtgtgtgttattacgtttggttaatttttgtatttttataaatattgtagttttgtcgttaggttggagtgtagtggtacgattttagtttattgtaattttaatttttagggtttaagtaattttttgttttaggtttcggggtagttgggattataggcgtttgttattatatttggttaatttttgtatttttagtagagacggggttttattattttggtttggttggttttgaatttttgatttggtgatttattcgttttggttttttagagtgttgggattataggcgtgagacgggtttttattattttggttaggttagttttgaatttttgattttaggtgattcgtttatttcggttttttaaagtgttgggattataggcgtgagttattgcgttcggtcgttatttttttttgatatatgaggagatgaggtttaaagaggaagttggacgttagggtttcggtaaatggatttttttttcggtttttattaggcggttttttgttgggtattttttcgttatcgggtggggaacgttttttatcggtagggtcggtcgatttttttgggttagttttttagttgttcgttgggcgtcgttttcgttattcggtcgaggattcgtataaggtgttcgtggcggcgtttgacgggagcgtcgtgtttaggggtgttttttcgttttgcgttcgcgtttagcgtttcgcgtttcgcgttgtttttcgtgagatcggcgggcggcgagtcgcgcggttttcggggtagtgtcggatacggcgggcgcgtattcgtaggcggggtacggtcgttttcgttaggattcgtaggttcggaaacgttttttgttataaaggggggaatacgtgggcgtcggttgtcggggcggcgattttagggaattagggttatttggagagtcgtttatcgtttttgttcgttcgattttttcgttcgggtcgttcggtcggtttagtcgcggtcggcgtttggttgtgaggtggattttcggtttagtttgattatttttttttagtacgtatacgcggttcgaattcgtatttaattagacgtcgattcgtttttgagagttttttatatttttcgaagtttcgcgatggtggatagttttttttttttaggaattttttattgatattgtttttttgagagttaggttttcggtttttgatagtttgtttggttagatttttagttttatgggattcgggtgtttgcggcgaaggagttttcgtgagggttttttttttatttaaatataggatttatttcgatttcgtagtttttttttgtttttttttttttttaggtttttttatttcgttcggatttttttataattatgtttattttttacgtttttttttatttagatgttttttttagttttcgagtttttatagtcgttcgttatggggaggttggggagggtttcggatggggaggagtttattttcgtatttgtttttagttattttcgattagtaggatttttttttttttatttcgtttgtcggttttggagtaggggttcggtgggttttgggtgtggggggttacggttgtggtttagttgttgtggttagtaggtttggggggtttagggggtagtcgggcggttgtttttgtttaatagtgggttagttacgtcgatacggagttaatattagttgtttgtggagtaacgttgtcggttttgggatttcgaagttcggtttaggatttttaggtgagggggttgtatagaagagggggaggggagaaatttagaggagggaagcgaggattggaatggataatgagataagaaggtagtatattagatgtgggaaaagagtgattaaattttagattgttaattggtatggtaattttgggtacgttttatagattcgttgtgttttggtttttttatgtttatgaatacgtaggtaagttgatgtaatgtttgttttattgagttaataggattaaaagatgtgcgtagagtatatagtttagtgttaggtatttttaaagttttttagtaaaagtttgatgagtttgaaattgatgaggatagaagttatttgaattgtaggaaaagattgggtgagggagagatgataattgttgggaggagataaaagagaaatgaaatgaggaaggtaagtgagaggagagataattttgttagattgtaattattagtttttttaaaggagatttgtgttttggtgtatttttaattttgtttttttgtatggtattgagtatatgatggaaaattagtattttttgaatggatgaatgaatgtggtagattttgatttgtttttttatattgtgattattttatttataatagagtttttgtatttagaatgtttgtttaaataaataaataaaatagagttttttttttttggaattttttgtttgttttttttttttattttttttttttttttttttttttttttttttgagacggaatttttttttgttgtttaggttggagtgttacggtgcgatggtgcgattttagtttattgtttaagcgatttttttgttttagttttttgagtagttgggattataggcgtttattattttgttcggttaattttttgtatttttagtagagatggggttttgttatgttgattaggttggtttcgaatttttaattttagatggtttgttcgtttcggttttttaaagtgttgagattataggtgtgagttattacgtttggtttttgttttttttattttgttttatttttttttataggagttaagaaaaatagggtattttattttatatttgtttatttgttgtttttttataagaatgttaattttattaggttagggttttgtttatttgttcgtgttttttttttattttttggagaagtatttaatatatatttattgatgttttgaatttggtagttattgagatgttttatataatttttatttttatgtttaatatattgtatttaatatataagtattgagtagggatttgttggatgagttagaagtgttttgtttttttttttttgagacggagtttcgttgtgttgtttaggttggagtgtagtggcgtgatttcggtttattgtaagttttattttttgggtttatgttatttttttgttttagtttttcgagtagttgggattataggcgttcgttattacgtttggttattttttttttgtatttttagtagagatgaggttttattatgttagttaggatggtttcgattttttgatttcgtgattcgtttagaagtatttttattgtgattatttgagtgaagaaatgggatttagaggtggtgatttgtgagagtggggtggagggaggttatatggattgggttgtggtgggagatggaggtgggttaaattttgttttatatttttttttttttttgttaggttgtgttgggggttttgggtagggttttgagttttttggaggagtggtttcggttgtatatttatttggtcggggaggtttttattttggttgatttggcggttgttatagttttgttgttgttttttcgatacgtgagttattaggtttggggaagaataagattgttttttttagattttattgtagggtgattgagaagagttatttattttttgttttaggttttagatttatttgttcgtcggatttggaataatgtgattcgttggtttgttacgtgtgttcggtagttagaatttcgagtcgtgttaggagaagtggttttatatttaggagttaggttttttttttattagttaggtgaggaagggcgaggagttggaggataggggtttttttggggttttttatgtaatttatttttttttttttttagaaatggtagaattattggggtagggttttgcgggagaggagggagaggggggaggttagtatgggtaagatttcgggtatttaaaatattttatttgaaatttagtatggtcgtttaagagggtttttagttggttgagtttgaatttttgtatttttttttaggtttcgaggtttttgtttttttaaagatagttgtttagtttaagaaagaggtaaagaaacgggagaagttagagaaattttaatagaagtagaagatttaatagtagtagttatttttaggggaggtgaggcgagggtggagttggaaggaaagttgatgtgtgcggtgatgggttggttgatgtttgggtttatgtttttttttttttaagtagaagaaattaaaattagagaagagggagaaacgggattttggggttattatttatgattttttaattttattcggggaaaagaaaggtattaggagtgggaaggggtttattttttagtagttttttttaagtttttattttattttgttttatttttgtttttattattttgtttggtgaggaattgtagattttttgttttgtttttaggttttttaaatgtttgttttatgatgtgagtgacggagatttcgatttttttttgttagtacgttttttttttagagtgtttttagttacggtattgagtttttttttttttttttttagatgttagtggttttatgttcgatttttatagttttcggtatgtggaggttgtttggtatttttggtgggagtagtagggtttttttaagttagagtatggggtgagtaggtattgttgtttaggtttagagtgggtggggtggggaagggtaggattgaaggatgtgttgtttgggaggggttgggagaggtgatttgaggttttaaatatgtgttatttttttttattattagcgttttaatgtgttagtagtaaattttcgaggtgtttttatgatgtgtattttattttttaatgtgataggttttttgtatttgggttatgtatttattaacgttatttaggattttttgattcgatggtgagtttttatttgtatttttttttggttttttttgtttagtttggttttttttttttttttgatagtttttcgagtttttttttttttgggttggtgtttatttttgtttttagtggtgttatatttttttttgttattttaatttgattatttagtttttttttttagtttagtatttttatgtaatatcgttatttgtagatttttttttattttttttttttttatttaattttaatttaatttaatttaattttttgtaaagatgagtttttattttgttgtttagtttggtttttaatttttggtttaagtgatttttttgttttagatttttagagtgttgggattataggtgtgaggtattatatttagttttttttttttttttttagtaataataatattattttgaatttaattaggaatatatgaatatatatatttttttttggggggatagagttttgttttgttgtttaggtcggagtgtagtgacgttatttcggtttatggtaatcgttgttttttgggtttaagtgatttttttgttttagttttttaagtagttgggattataggaatgcgttattataattgattaaaatatatgaatatatttttgtaagaaatttaaagttttaaatttttttgattatttttttttatatttatttttttttaagatttagttattgttattattttgatgtgtatttttttagattttttttatttatttatatatatacgtatttatagaaatttatagttttttttttgggtgagttttttttattttttaatataaagggtttatattatatttgttatgatttagttttttttttatatttaatatttttttttggagatttttttttgtttttatatatatattatatatattgatttttttttttttaattgttttataatattttatagtgtggttgtattatagtgaagttatttttttttttttttttttttttttttttttttgagatagagttttattttttttgtttaggttggagtatagtggtatgatttcggtttatcgtaatttttattttttaggtttaagcgatttttttgttttagttttttaagtagttggtattataggtatttgttatcgcgtttggttaatttttgtatttttagtagagatggggttttattatgttggttaggttggttttaaatttttgattttaggtgatttgtttgtttcggttttttaaagtgttgggattataggcgtgagttattgttttcggtttggagttattttttaattaatgatttattttgttttttgttttttgttttttttttgttgaaaattttattttaatgtatatttttgtatattaagtttgtttaatttgtagtttgtgggttatatgcggtttaggacggttttgaatgtagtttaatataaatttgtaaattttgtttaaatatttaagaatttttttgcgattttttttttttagtttattagttatcgttagtgttagtgtatttttttaaatttatttttattatttatttatttatttattttttgagacgggttttgtattgttatttaggttggagtgtagtggtatagtttcggtttattgtaagttttaaatttcgttttttacgttaacgttatttttttgttttagttttttaagtagttaggattataggtgtttattattacgttcggttaattttttttttgtatttttagtagagacggggttttattatgttagttaggatggtttcgattttttgatttcgtgattcgttcgtttcggatttttaaagtgttgggattataggcgtgagttattgtttttagttagtgttagtgtattttatttgtggtttaagataatttttttatgtggtttagggaagttaaaagattggatatttttgttttatatgtttgttgaagtatgtgtggaagggtttcgttggtgtagttattaagaagtgaaattgttaggtcggtaggggtatatttatattaagtataaacggaagttgttaagttgttttgtagaatggttttgttgattgatatttttaggaattgttgtgagagtgtttatttttttatttttgttaagtttgagtattagggttgtttaattagttttgttaatttgatgggtaaaaaaatatttttgttgttttattttgtatttttttgattgttattgaagttgtgtttatttttatgttttttggttagttaggtttatttatatgtgaattgtttgtatttatttttttttcgtttttttattgatttttcgttttttttttttttaattttttttttgagaattttttatttgttttgggtattaatttttttgttaaatattgtaaatgtttttgttgtattattgtgtggtagtttttttgttaattgtaaatgttttttttgttttttgttattatttgtttttattgttaatattttaattagtgataaatataaagtaatattttaggtgataaatttttttaaaaagtattttaaaataattttattatttttggaaattagggtttattatatttaaattttgagaattttttttggtgttttatgtattaaattaatgtggttaaaaaatatttattgggtttaattatgtgttatttttgttttgagtattgggaatataatgtttgattgtgtattttgtaagtaattgagagttaggaaaatagttatatgttttatttttttatttttattattattattattattttgagatagagtttttttttgtcgtttaggttggagtgcggtggcgtaattttggtttattgtaagttttgttttttaggtttatagtatatttttgttttagttttttgagtagttgggattataggcgttcgttattacgtttggttaattttttgtattttttttagtagagatagggttttattttgtcggttaggatggtttcgattttttgattttatgatttgtttatttcggttttttaaagtgttgggattataggcgtgatttatcgcgtttggtttgtttttttttttgttttttttgtttttttgagatagagtttttttcggttttttaggttggagtgtagtgatgcgcgtttattgtaatttttgttttttgagtttaagcgatttttttgttttagttttttgagtagttgggattataggcgtatgttattatatttggttaatttttgtatttttagtagagacggggttttattatgttggttaggtttgtttcgagtttttgattttgtgattttttcgtttcggttttttaaagtgttaggatgataggtatgagttatttcgtttagttaatagttttgttaaatatatataatatataatggttaagttgtttgcgtttgtgtttgcgtttttgtttttttaattttttaattttttttttttttttggaaatggggttttgttttgttatttaggttggagtgtagtggcgtagtttttgtttattgtaagtttttttttttaggtttatattatttttttgttttagttttttgagtagttgggattataggagtttattattacgtttggttaattttttttgtatttttagtagagacggggttttatcgtgttagttaagatggtttcgattttttgatttcgtgattcgcgtatttcggcgttttaaagtgttgggattataggcgtgagttattacgttcggttttgttttttaattttttaataaaattaagagagggtttcgttatgttgtttaggttggttttgaatttttgggtttaagtaatttttttgttttagttttttaaagtgttgggattataggtatgaattattatatttggtttttaagtttgtttatatgaaaatagaatgattatttttttttttttaattgagatagagtttcgttttgtcgtttaggttggagtgtagtgacgcgatttcgttttattgtaattttaattatttgggtttaagcgatttttgtgttttagttttttgagtagttgggattataggtacgtattattacgtttagttaatttttttgtatttttagtagatagagttttgttatgttggttaagttggttttgaatttttaatttgaagtaagtcgtttgtttcggttttttaaagtgttgggattataggtgtgagttattgtgtttggttatatattttttataaaatttttaaggtagttatattttttttttagtgaacgtggtttaaataaaatgtgagatatttttattattttaatggaatagagttatattaattttttatttttatttatttgtttatttatttatttttgagatagagttttttttattgtgttggttagattggagtgtatcggtatgattatagtataattatagtttggtgtagttttaattttagttatttaagtagttgggaataaaggtgtacgttattatgtttggtttttttttttttttttttgtagagattaggttttattatgttgtttaggttagtttgtaatttttgggtttaagtagtttttttattttggttttttaaagtgttggggttataggtttgagttattgtgtttggtttgaattttttaatttatttaaagtttttttttgtgattattggtaagggggagattttttttaaataattagttagttgttttaaatattttgaatagtttatttttattttattgataggaagtgttaatttttataaatattaaatttgtttgtatttgtttttaggtattattttgtttttgtttagtaatttattttaataattagaatttttgttattttgtttggtaggagtttttttttcgttttttttttttttttttttttttttttttgagatagagttttattttgttattcgggttggagtgtagtggtataattttaatttattgtaattttttttttttagttttaagcgattttcgtgttttagttttttaagtagttgggattataggtatgtattattattttggttaatttttatatttttggtagagatagggttttgttatgttggttaggttggtttcgaatttttgtttttaagtgatttattcgttttggttttttaaagttttggggttataggtgtgagttattacgtatgtttgtttttgttttttttttatattgttttggttttttttttaaattttttttttttgattagttttagaattataagggttttagttttatttttgtttttttttttttttgtttgtttgttttttggagacggagttttattttgttatttaggttggagtgtaatggtatgattttagtttgttgtaatttttgtttttcgggtttaagtaatttttttgttttagttttttaagtagttgggattataggtatatgttattacgtttagttaattttgtatttttaatatagatagggttttattatattggttaggtttattttgaagtttttattttaggtgatttatttatttcggttttttaaagtgttgggattataggcgtatgttattatgtttagttaattttgtatttttagtagagacggggttttattatgttggttaggtttatttcgaatttttttatttgaggtgatttatttattttagttttttaaagttttgggattataggcgtgagttatcgcgttcggtttttttgtttttttatttagtttattgattttttgtttgaagtttttgttttttttggtgttaggttttattggtttggtttattttttggttttttatgttttttaataggtatcgtatgcgtggggagattattttgtggaattttggttgtgattatgtaggtattgttatttaggtggtggtggagaagaagttatggcgtgagtagggattgagtcggtattagttgggtcgcgaggtttttttataggaagtttggaagtggaaggaggagtgagtatgtagtatttttgtgggtatcgtagttttgtttttttgttttttatttagaagatttttgttatttgtaattttttggttatagggttagatttttttatagaggtagagttagttggttttagggtttaggtaaattttagggggatgggtgatttttatattgtttagttagttatttgatgtttttttttagtttaggtacgagtgttgattttagtttgtttgtttttaggaaaggtgatcggatttattattagttgaagaagtttggtagttttttggattgggatcgagtttgttttattatggattttgtgcgtgggaggagtgttaaagttggggtaggagtaggagtttttttagggtgggatttttataggagaaagtagaggtgttgtggtttttttttaggagttggtttatgtaaaatattatggagggtttagttgtaaatgttattttttatttttcgttatggttttttttatattatggttttttatgttttttgttttggttttgggagttttagatttttttagatggtatatgattaggatttcgttttttatggagtttgaatttttagtgttttttgtattagtatttgtttttagttgattgtttttttcgttatttgtagtattataaggtttgttgtttgtttttgtgtttttttagtttttttttttttttaaggaaagaaggaaagtattttttttagaggggtttttgtgttggttagtgggattttgtatgggtaaggttttattggagttttgggtgtttgtttgggtttttaggtataaggtttatttttttgattttttttttttttattttagaaatttttagtagttgtgatagaggtttttgttcggttttacgaggaaggtattatttatcgtagtattcgttttgttaattggttttgtatttttaatttcgttatttttgatattgaggtgcgttttttaatttggtttgtttttatttttaatttattttggttttggttttggtttttgggttacgtttttaaatatttattttataggtggataagaaggagttgataggtcgtattttgtttttcgtgtttggttataaggagaaggtggagttcggggttttcgtgttttttgtttataaggtttaaggtttaggtaggagttaggggtattaggattttgggttgggagtggtaggaaggggttaaggttaagattataaggttttttgttattttagatagcgacgaggaggtggtggtggtaataattcggatcgagataatgttgggagatgtggttgtagttgtgtattttaaagatattagatattaggtgggggattgtttatagttagggaaggagttttggttaaaaagggtttttatttttatggggtggaggggttggatttaggtttttggttgaggagaggaaattgggttagaaattggtttttagttttttttttagttttgagggtagagttattggggattgtttgggggagtttaagtgttgggatagttagggttttggaaaggaaggatttgggtttagtttttcgtgtatttttaaaaagttaaatagttaggtatagtggtttatgtttgtaattttagcgttttgggaggttgaggtaggtgaattataaggttacgagttcgagattagtttggttaatatagtgaaattttatttttattaaaaatataaaaaattagttagttgtagtggcgggtgtttgtaattttagttatttaggaggttgaggtaggagaatcgtttgaatttgggatgcggaggttgtagtgagttgagattattttgttgtattttagttttggtgatagagcgagatttcgttttaaaaaaaaaaaaaaaagttaaatagagataaggttttattttgttaattatgttgattttgaatttttggttttaaggaagttttttgttttagttttttaaagtgtgggggttagagatgtgagttatggtattaggtttttttatgtttttatttatttatttatttttgagagagggttttattttatcgtttaggttagagtgtagtggtattattttggtttattgtaatttttatttttcgggtttaagtagtatttgtgttttagttttttgagtagttgagattataggtacgcgttattatatttggttaattttttttttgtatttttagtagagattaggtttttttatgttggttaggttggtttttaattttcggttttaagtgatttgtttattttagttttttaaagttttgggattataggtgggaattacggcgtttggttttgttttatgcgtttttggtattttttcgtttttagtatttgaaggggaagaacgtgatttatttatttttgtttcggagtttttttattgttttcgatgaatttgtggatatggattttggtataggtgggtaaggggttggttttgtggggagaggaaaagattggagttgtattttagttgtttatttttttttagagaaaaagaaaataagttttagttaaatagatagagtttggggtggtttttaagggattgtattagataagtgggggttaggagtggtttcggagttatattttttagtaaaagaggtgagtgtaggaaggaatttcgtggagttttttatgatttgggtattttgatgtatatttaggtgttgtgaagattattttcgtatatgattaaaatgattatgaagttgggtagcggtacgggttggaggttattagtattatggattttcggggggtttttattaatgtgttttcgttttttttggtgaggttgtttgaggtaagagtgttcgggttagggagatggagggatggttgggtatcgttatgatgaggttttatttttatttagggtttgtttaggtttgaggttaggaaagcggtgttggtggcgttgaaggagcggggattgtttcgtggtattgaggataattttatggtggtgttattttgtaagtgagggtgggggtttgggacgggaggaagatggagggttttttagggttttatcgtttggtttttttatttacgtgtatttttagtcggtcgaaggacgtggtagagtttttgttgcggtcgtagtggtacgttcgttgcggggagatggtttaggttgttagcgtcgttgtgattcggggtgattttcgtattttgtttgaggtttattagcgtatatggtatgtttggatggataatattcggtgtgtagggtttttagtgtgggaggggtttgtcgagggttgagtagggtttattcgggttaggttttattaggttttttttgatttttttttttcgatatttgtagggagtggtgtatttttaggtagttgtggtggggttatcgtattttagtttattttgttattgttagtgatttagcggtgttttttggggaggtgagtagagggttagagttagttgttgggatattttgttggagtggtgggtttattgggtttttggtggggggaggggtagggtgagttagaagtagatatatttttttgggtaattattgtatttgtggtaggattttgatgggcggtattgggtgagtggacgtaatgaggcggaggttcgggagaaggtagttaaggagttcggagtgttttttgataagattagtttttagtaaggtaaggcggggttttgagggtttggagggagttgtggggggtagagttttattttttttgatttttgatttttggttttttttagatgaggatgtattggatatttggtttttttttggttttttttttttatttattttgggttggtttaattaggtgtgtttttggggtcggggtttggcgggataggggattggagggtgggtgttggtttttttttatattttggtttgtttttagttagaagatttgagtgtgttttatttcgggatattgttggagatcggttatgatattttttttttttgggtggttcggatggttatgttgggtttgaagtttacgggtaggttgttttttagagaggtgcggagatagtcgagatttttttatcgtttttagtttttttttttatcgttttgtgttgtagcgtagatttcgcgtggttggggtatggggttagttgtgggtaggtttgattcgggggttggtgtggggttgaaatttagtttgggttttgtttagtgatttttgtgtttagggttttatttttttagaggaaggagtgtttttgatttatataaaggcgtttaacgagtttttggggatatttagtgggatttgaggtttatagtggggtagattagatatagttttggtcggggtattgaggtcggggaaggagaggattgagttttatgggtttttttatttgttttgtaggtttatttttatgttatcgtgcgagatgtttacggtcggaagatgagtaagtttttaggtaatgttatcgattttttggatgttatttatggaatttttttgtaggtgggttgggtgttgggttagttaggaagggtcgtggggttgtggttatagttatttgattgtttttattttatttttagggtttttataattagttgttgaatagtaatttggattttagcgaggtggagaaggttaaagaagggtaggtatggagggttgggttgggttaagtaggagtatagcgtggatggggttggttgaggacgtttttttttttgttttttttttgtagaaagttgattttttagcggggatttttgaatgtggtatcgatgtttttcggtttggattatgtgtttatatgttttagggtatggtttttaaagcgttttttttagttatttttttttttttttgtgaggtttattttttttttttattttgagtttttggtgggtatgggttgggaagagggtgatgaggatttatattttattttcgatttaggtcgtgatattaatttggatgtgaatcggatattgggttatcgttatttttgtaataagttttggaatgttattaagtttgtttttcgtggttttgggaagggttttgtgtttttatttattttttaggtaagggtttggtgggtagtaaagttggtagtatttatataggttgtatttttgttcggagtagtttttatgtagttggggggatagatagatatagagatagatagttaaagggaaagtttagcgtattgggggttggggtttgttatttttttttagattttggtatataggtggttgttttggatttattagattttggatgaagatttgtttatgatttttgtttttatggggttttggtatttttttttggttcgtcggttgatatattttttttttttaagttcggaggttatgagagtttggtggatcgttggattcgtagtcgtttgatagaggttgtgaggtttagtaattaaggtttttaggtttacgatttttcggtcgttattattgtttagtatagtttttggttttatgagttttgtgatgtttatttggtgagaaggagtatagcggggtaggggatggtgggggtaggtgggtagtagagttttgggtttagttttgttagagttggttttgagatttaagttaatttattttttttttagtttttataggtatagcgagggtttaaggttagatttttagtcgtgagttttgtatttttcgttttttaggagtgtttgaaatttgtattgaatggggtggattaggtggtagttgagtgtgttcgttagattttgtatatttgtttggacgttggtttgcggttgtttttattttttatgtttttcgtgacggaggagttgttttagaggttgtttcggaggatgtcgtaagttttttttagtttttgtgttattttttattcggagtttttagaggtatggtatggtttggagaggggagtttgatttgttttttaggtttttttatttttttttttattttatagtgtttttggaaggatttcgaggtagaagtcgtttttgagttggcgttaagtattacgcgagtcgtgcgttttttgcgggtcgattataattttattcggattcggtttgattgtgagttttaggtttttatgttcgttttattttattgtttttttagtttattttgggatttagtgttcggtagtgattgtttggttttttgtttttatggagttaggttttatttttttttttttttggtaggttttttggaagtggcggatgaggttacgggcgttttggtatcggcggtgtcgggttacgtgtaggttttggttagcgtaggtgtggtggttgttttggttttgggggttttcgttttttagggttgcgttgtggttttggtttttgatcgttgttttatttatttgtagttttaggggttggtggattttgtacgggagttgggtaagttgtaagttaagcgagttgaggtttagcggtaggtttagcgtttgcgggaacgtcgtgttgtttcgggttattttgttaaggtgtcgttcgaagtttaggaggtagatgaagttaaggtgtgtggtttgggtgggtattttttatattattttttttttttattaaaattttggtttgggttggttcgagtgtagtggtgttgataattaattgatcgtaattagttatagatttttttgttttttttttatttttattagttttaaaaaataaaatagtttggtttagtggtttatatttgtaattttagaaatttgggaggttaaggtgggtggattatttgagtttaggggtttgagattagttaatatggtgaaattttatttttataataaaaatataaaaattagttggttatagtggtatatatttggggttttagttattcggggggttgaggtgggcggattgtttgagtttgggaggttaagattgtagtgagtcgagattatgttattgtatttgagtttgggtaatagagagaagattttgtttggaaaaaaaataaaataaaataaaaattaattttggtttggaagttggattttgtatttaattttggggaatttattggggagtatggagtttaggcgttttgagtagggattatagaaggttttttttttatatatggggagtagttgggggttgggtataatttagggttatataataggtgggagacggaggttgatttagaattaggtattttattttttagttagatttttcgtattttatttagttgtttaaaatgtggaaatttgtatgtttggggttgggtttggggtttatatgtagtcggggagttttgggttttttattatttatttttaagtttattgggttgattttggaaggttagttttgtttgttttttgttttttgggtttcgttagagagaagtagtggagtaaattgtatagatatagagaaaattagttatggaggttaagagttagagagttttgagtggacgtggttaattttatttggtttttttaagagttttgggaggggggtaatattattattattatttgataaatgaagtgatcggtttgggagattgtgtttttttgtttaggtggggatattgaatggggaatacgtaggttttgaggtttttttgtttttggggatttattatttggtggaaaaaggtaagatttaagaggtggtggtggaagtgggggtgttggtgggaatgggtggggagttaggttagttaggtttacgttttttttgagttattgattttttatggttttcgtttatttttttaattttgttgttttgggtgtttgggggtttttttatttggatttgggtttttatttattttttggttttattttagttttaatagatagaagtagagtttaggaaggtggatgaggttatcgttttattttagaagatgttgtgatttattatttagttttattttttatttttagcggtttattatggggatggtagtaataaaatatttttttataaaatttttttgttatttgtggtgggggtagagaggggagtagaggggttgggtgtttgaatttttgggggttgtagggtgggagtgaggttttggttttggagggtagaggggtgcgtttatttgggtttgtttttggtattgtgttaggtttgagttacgttgtttatttttttttttttttttagtttttatttattttcgtattgtagttaagggaggttcgttttggcgtgggttgttgtttgtggttttgggtaggtaggagcgaaagggttaggggttgtttgtttttttttattttgttgaggtttttttttttttttgttgagtttcggttaattataattttgatttaagtgttttgtgacgttaagttcgggttagttttgtttaggagatttagtaattaggtaggggagggtttgagaggatttaggttttttgagtatggggagtgtttttgcggtagggttggggacgtagttagggattggggaggggggcgtgggggaggaattttggattttttttttggtaggtgtgtatgtttttaatggttcgatgaggtttttaggttgtttgggtgatagcgagagggtggggaagttaggttggagtagatacgatttttgaggtaaagtaggtttttatggagattcgtagagtcggtttgttttggaatcgcggttgttttttttttttttgagagttttttgttttttaggtttatgttttagttatgttttttacggaggttttttaattttattcgggttttttagcgttgtttttgttgtagttgttgttgttttttatatttgtttttttttttaatatttggagtttgttggttgtttttggttttattatttattaagatttaattgaggaggtagcgtttaacgttattttgtagttttttttggagtagttatttttaggtcgttttttttttcgttttgaggattttttggtgagtattttagggttttgttatatttttgttagagtttttaattttatggggtttttattttttgagggttttggttgttaagagaagagatatttatggttttatttttgtagtaataatatttagtagttttggttttgaaattaggagtttttttttttagaaaggttcgggattgttttttttttgtggggtttaggatttttatatttagttttgagtgttagttgttgagataaggtgggtaatagttaatttaaagggtttttttggagtttcgtcgttcgttattttttttagggtcgaatattttttgttgatgatttttttgtcgtttattttggatttggtttttttcggcggtttcgagtagttttaggtgaggtgtttcgtgttaatgtagtttaggattttttgttaatttttaggaatgatttcgatttgtattttgatgttgagcgattgggttagggacgcgcgcgtttggtaggggttttgcgggagatcgtggtggtagttagggtttttgattatattttggttcgttagcgtttcggggttgtattttatgttttgtaggtgagaatagggttgggttgatggttagaggggtttttattttcgtgtttgttcgggatggagcgcgttttatggtgtttttttgattatgttttttttattttggaaggggtgggtattggtacgcggtgtttcgaggttgtgttttagttttttatttttaagttggtagtgttttttgtaggaatagtaaggagggcgttgtggttggagagaagtgagggtgagagaggaaggttgcgaggttagagagttgagggagtagtatacgtagtaggattttgtaggtcgagagaggttttgggttagattttgagttgggaagagatgttgggatagtttttatttgggtaaagttttgttttgagtaatggagagagggtagtggaggggatttggggtgtttggtgggagtagtaggggtgggaggggattttcgggatggggaatttaaaggagtggtatattagtgttggagatggtgagaaaggttagattagtgttttatttttttttttttgtttttcggattaggatttttatagttatagtaattgggtggagttgggcgagtagtagttatatttttattttttttggttaaggtaggagttttagaatttggtataaggtatggttgtgattttggtggtgaggtaggagtttatagggttattttagtttatttagttattgtgttatattttgaagttttagagggtatgatgttatttaatttttataaggattgaggttttttagtttaagtaacgtttggtttagttaagtagtttttttaaggttatatagggaaaagtagttaggattaggtttttagattttagtttcgttttaagtgtggtttttttttcgtattgatttttatggggtttttttttatagtttttttatttttttatttggaagttgttttttgtttataatttatagagggtataatttttataggattggtttttatacgtattgtgtttgttttttttttattatttatttatgtatttattttttagagatgaggttttattgtgtggcgtaggttgttttgttcgttttagttttttaaagtgttgggattatagtcgtgagttatcgtatttagtttgtgttgtgttttttagtatagttttagttttaaatatttaggtttattgcgggtttatgattttaggttttagtttagaaagttttgttagggaatttttgggtgttcgttttattttagttgggaggagaagttgaaaaggtttgggtgggtggggataaaggttgggggtggtagaattttgggttttagttttgttttttttttttagtggtcgattttatttgtttcgattgcgaggagttgagttgttttaggaattggttgggttttatattttttatttttggttattttggaatttatttttcgaaatttttaggtattagataagaaagttttttagaagtaaggggagaaagttatttttttataggatttttgttttgtaggttcgtatgtttttgttatggtatttttttttaggaggagaggatgttgggaatagggtgggtggaggaaagttttttgaggaggttgtggtggggttgaggtaggggagtaattttttttttcgttgataggattttttttttgttataggtagttttgggggattggttggagggattaggggatttattatgtgttgtggtgattgattattacgttttaagatttattttagaatttttttttataaagtattattttttttattttttttttttttttttttttttttgagatggagttttgttttttttgtttaggttggagtatagtggtacgatttcggtttattgtaattttcgttttttaggtttaagcgatttttttgttttagtttttcgagtagttgggattacgggtatgtgttattacgttcggttaattttgtatttttagtagagatagggttttattatgttggttaggtttgttttaaatttttgattttaggtgatttatttattttagttttttaaaatgttgggattattggtgtgagttatcgtgtttagttattatttatttatttatttattttttgagatcgagttttgttttgttatttaggttggagtgtagtggcgtgatttcggtttattgtaattttcgttttttgggattaagttattttttttttttagttttttaagtagttgggattataagtacgcgttattatatttggttaatttttatagttttagtagaaatagagttttattatgttggttaggttggttttgaatttttgattttagatgatttgtcggtttcggttttttaaagcgttgggattttaggcgtgagttatcgcgttaatttcgttattattttttgttgaatttttgttgaggggtgagagggttaggttaggtttgaaagggttttatttttttaggaggtagtgggtttttgatttttattttttagatttttttttttaatttagggaaatgtagttacgggggttattttgatcggagtagtttttagttatcgaggggaggtattaataaggatagtatatttttaggtttttttttttattatatgttgtatttttaggttgtaaaattggtttttttagtttttatttaggtttttagttttttgcgaagtcgtttgggagatagggatttttttaggtgagtggttttttggggatggatttttttatggggaggcgtttttgcgggaagggagaaattaggcgttggggataaacgtgtaggttttttattgtgtttttggtttgttttttaggttgttggatattattttagtttttagtttgagttttgttttggatattacgggtagtatgggtgaggagattaacgttgttaaaatttaggttcgttattttgtggagtagcggagaggtagttttatggagtttgtttattatgttttggtgtttttttatgatttaggtaagtgtggtttggttaggatagtagaggggaggaaaatttaaggtaagggatagattgggcgtggtggtttacgtttgtaattttagtattttgggaggttgaggtaggtggattatttgaggtcgggagtttgagattagtttgattaatatggagaaatttcgtttttattaaaaatataaaattagtcgggcgtggtggtgggtatttataattttagttattcgggaggttgaggtaggagaatcgtttgaatttaggaggtagaggttgtggtgagtttcgagatcgtgtttttgtattttagtttgggtaataagagtaaaaagttttgttataaaaaaaaaaaaaaaaaaaaaaaaaaaaaagaaaagaaagaaaaaaaaaagaaaagataaaaaggtaagggataaaggtttgtggtgaggaagtgggttcggggtggtattttttgtagtttcgagtgagtttttattgtgtgtatatagaaaattagtagtaatttgggtggggtggtttatatttgtaattttagtattttgggaggtagaggtgggtggatcgtttgagtttaggattttaagattaatttgggtaatatagagaaatataggtttttataaaaaaattaataaaaattatgtgtgggtgtggtggtatatgtttatagttttagttatttgggaagttgaggtaggaggattatttgagtttaggagattgaggttgtagtgagtcgtgatggtattattgtattttagagcggtttgggtgacgtagtgagattttgtttttaaaaaaaaaaaaaaagataattagtagatttgttttttattttttttaaaatggtagtattttttatgagtttaatgtatgatttatgttttggtacgtggtttttgtttttttaggtttttatgttaataaattattttttttttttttttttttttttttttttgagacggagtttcgttttgtcgtttaggttggagtgttatggcgcgatttcggtttattataagtttcgtttttcgggtttacgttatttttttgttttagttttttgagtagttgggattataggcgttcgttattacgttcggttaatttttgtatttttagtagagacggagttttatcgtgttaattaggatggtttttattttttgatttcgtgattcgttcgtttcggttttttaaagtgttgggattataggtgtgagttatcgtgttcggtcgttatttttaattttttttattttttatagatagagattggtattaagatggggttgttggggttaggtttttgggaagtatttgagataattagttatattgtattttttttttattgattagaagttagattttttggtttgagtttgattgtgtgtttttaggttggttatgtaaattttttttgtttcgattttattatttgtaaaatgggtattagttattatattagggtggggtaggatgttggaatgttattagttaaggttatttttattttttttgtggatttttagttgttttaggttatttggatgtataagtgttagttataggggatatgattggttagtttgggtttagaggtttgatattttttttattttgtttaatttttagagttgaaatgatgattaaataaaatgtttattggattgagagttgtttaaatttgagttttatttgtttgtatatattttatagtggttggtatttaatagatttattatgtttgatgaagatataaataaaggtataattaagaatttagtatttatgtgttaaagtattattttaagatttgtaaaattaatttatttagtttttttaataaatttttgaggtaagtgttattcggtttttttttttatgaggaaatttagttttttttttttttttttttttttttttttttttttgagagagagagagggagagttttattttgttatttaggttggagtgtaatggtataattatgttttattgtagtttcgatttaagtaatttttttgttatagttttttgagtagttgggattatagatgagtattattatatttggttaatttttgtatttttttgtagagatggggttttattatgttatttaggttgatttcgagtttttgggtttaagtgatttttttattttagttttttaaagtgttgggataataggtgtgattatttttttttttatatacgtatatgtagttaataaaggtttataggaaatgttattattttttttagggagtggaggttatttttttattagggatatttaggtttgttttgttttgtttcgttttgtttcgttttgtattgataagtatgattttttttttttttttttgagatagagtttgtcgttagattggagtgtagcggtacgatttcggtttattgtaatttttgtttttcgggtttaagtgatttttttgttttagtttttttagtagttggggaggttattggggagtttttggggaggttattggggaggttacgggtatgtattattatgtttagttaatttttatattttttagtagagacgaggttttattatgttggttaggatggttttgattttttgattttatgatttatttattttggttttttaaaatgttgggattataggtgtgagttatcgtattcggttaagtatgagttttataatggagtattgttattttaatatttgtcggttttagaagtatattaggttttttaattggggaggtggttttgggtaagaatgaggggagttttttttttatttattttaatttttttttttttttttagggttcggttttgtttttataattagtgattttgatagtttttggtaatagtttaatgagatttatgttttggggggtggagacgagtttgagatgtgtttgttagttttgtaggtttggttttttttttttttttcgttttttggttttattattagggggagttagattttttttggggttttttattatttttagtatttagatttattagttttattgtagggttttcgggttatatttttttttgttttatttttcgtggttttatttattttttttttattgttattgttaatattggtcgttgttttttttgttagttggttttgttgtatatatttttatttttagatatttttgtttttacggatgttttttttaaggatgttttttttattaattaggtggaatttttgatttaggagcggcgttgtcgggtgagtagagttagtgggagatttagtgttagttttttagggatgtgagagattttgtgatgataattttataacgagggttgtattatattatggtggtttaataagttttggtatatggtgggagaagtagataatgagtggaatattttttgatatttttaatgatatacgtaagaggttttatttttaataacgttgaatttttatttgattttgtttaataaataatgtgaagaattggggttttagtcgttaaaaatttattgtgatagttataagggggtggttaattattaattgaaggtagggggttttgttattgggattttttattttagtagttagaaggtaggtagagattttattataaattattagttttggagaaagtttgagtatagggatttttatttataatagtggatggtatttggatattttaattattgagtttttttttgggtataggtaatatttttggtgattgaagatatattaagggtttagggtcgagttcggcgtgagattttgttttttttgcgttttgagttatataaagtagtggttttggttttaggaggagaggtgatttttattaaagattagtatattcgagacgtggtagttattgttggggagagtatggttgttttggtaagtgggggttagggtttttatttaggaattgaagggtggttaggttgtatttttttttttataggagaaaggggaattatttttattgttgtgttgtttttttagttacggggtaggaaaggaagttttttttttttttagatttatgattagttatttttttttttttttttgagatggagttttatggttatttaggttggagtgtagtggtataattttggtttattgtaatttttatttttcgggtttaagggatttttttgttttagttttttaagtcgttagagttattagtgtttattattaggtttggttaatttttgtatttttttagtagagtcggggttttatcgtttttttggttaggttggtttcgtatttttgatcgtaagtgattcgtttattttggttttttatagtgttgggattataggcgcgagttattacgtttggtttgtattgtttttttatattagtaaatttttttttatttggtttttagtattttgtttttagggttattataggaagttttattatttttttggggaggtggtttgtattttgtagagatagagttttgttatattgattaagttgtttttgaatttttggttttaagtgatttttttgttttggttttttaggtgttgggattatagatatgagttattacgtttggtttattattttttaatggggtataagatgtgattgttttattttgaattttttgtttttaattttgtttttgattataataattttatttttggtttcgtgttttttttttattggtatttttttttgtttgtttgacgtggttttttttttttttttttttttttttttttttttttttttttttttttgagatagagttttgtattgtcgtttaggttggagtgtaatggtataattttggtttattgtagtttttgtttgttgggtttaagcgatttttttgttttagttttttaagtagttgggattataggagtttattattatatttggttaattttttgtatttttttttttttagtagagatgtagttttattgtgttggttaggttggtttcgaatttttgattttgtgatttattcgttttagttttttaaagtgttgggattataggcgtgattaattgcgtttagtttaatgacgtggtttttttttatttttttttttttttttgttttttattttatattttatttttttttttattttttggttttgttaattttttaaggtgattttttttttggatttttttgttgtggtgtttgggtagttatttgtgtttagcgtggatgggttgttttagaagattatagttcggatttacggagatattagtagtttttggattaagaattttgtaggtatttttgaaggtagagggaagagaggggatcggggaatagataatcgaggggatgtatttaaggagagtaagtgttttatgtgataattttttttttgattttaggggttttttagggttaggaggaaggcgggggttttttaggttatattcgtcgttttgggtagttttggatggtgattatggatgattttttatagataggaatttgggagatttaggttatagttgaggatatttttggggtgagagtgtaaggtaaggagggaggtgtttttgggaaggggaagtagagattgtaggttttagagaatacgattagttatattttttttaggaagggttttgattgtttttgtttttttttagtttagatttttttggatttttttttttattttgggatttttatggaggatggattttattttggtttttattttttgatttagttagttgtaggtatatttattttttgagtttttatttatttaatttttagttttttatatatatataaaatatataatatataatatatatattatatatataatgtatatatgtatatatatatttgtgtatatgtataatttttatattgagttataatttatataatgtgtattaaagtgtatagtttgatggattttatataatatatttagtttaggatatagaatatttttagtattttagaatttttttttgatgttttttattaatatttttcgaaggtaatttatttttttatttatattttttagagggaatttttattttgaaggttattaatttttttttttttgtgttttcgaattttataatgttttttttttttcgtttttgttttaggtttttagatttagttgttggtagaagtgatagggttgggttttagagttaattttggggatttttagtcgtattttttttacgttatttttcgaggggttttagagggtgtcgaattaggttaggtgtttttggagttcgtgggattttcggagcgaggttttttcgtagtttcgttgtcgtttacgttgttgtttatttttagatttttttttttggagttgattggttaggacgtagcggggcggcgtttgtatagggttgttttttagtttagtattgtagtttttgtttttttggaggtgagacgttaggggaaagtgcggttggggttggagagagttagagcggttttttttttgaagaatttttttttgtagtttagtggtttttcgggttttttggtttcgggtagtaaagtttcgtttagttttcgtatcgttagtttttcgggtttttaggattttgattttaggattttcgttaattttagttttttttttatttttaatttttttaggtgaggtttatgaattttttagttttttttggtattttgttcggttaatgtttattttaagttttgtttttgttttttttcgattggtttttagaattttttttttcgttttcgtgtttttgtaggcgtttcgattttaggttttgggtagtttggagttttagcgacgtttatattttttttttagggtttatttggaattgaatgagtcggtttggggtcgtttgtggttggaggttttagatttagcggtttcggatttcgtggtgatggtgattgtgattgtagggggacgagaagttaatttagtattttcgatttatgttttttttcggtttttggtatcggttttagtttcgtaggtgaggaattattattttttattatagggtgggtaaggtcggggagggtggtgtaggtttaatttgagtatagttttagtatattttgttatttttttttttttttttataggatcggtatattatttttatcggtttatttgattcgatttttattacggttatttttgttttttttttttttatattggtgatttaaggtagggttggggtagggttggttgcgggtagtttttggtggggtatagttggaggggtgttgtttttgttaggtttggttttttggtgatataacgggttttaaagggatgggtttttagtattatttttaatttgttttattggtaagaagatttgggatatatttgttatataggttttaggattttattttttttagttgggatgaaggtttttttttttttgttgttgttgttttttttttgagatgtagttttgtttattgtttaggttggagtgtagcggcgtaatttcggttcgttgtaatttttgttttttaggtttaagcgatttttttgttttagttttttaagtagttgggattataggtgttcgttattacgttcggttaattttttgtatttttagtagagatagggttttattatgttggttaggttggttttaaatttttgattttaggtgatttgtttgtttcggttttttaaagtgttgggattataggcgtgagttatcgtgtttagttaatgaaggttttttttttttattatatttttttttttttttagaaatttcgagattggggttgggtgtagtgtttacgtttgtaattttagtattttgggaggttgaggtaggaggattatttgagtttaggaggttgaggttgtagtgagttgtggtcgaattattgtattatagtttgagcgatagtgagattttattttagaaataaaataaaataaaatattttgtaagattgggatagagggtaatggatatttttataatgtattttttttaattttatgagaaataaattaaagatatttttggagaaagttgttttttggagtagttttagttttatttttgtatttaaggttgaaggatagttttaataaatatgttttttttttagagggattttaaagaaagatcgtttttgtatgttatataggggagaatgaggatatgagatattaagaagatgaagtttttaggagtagaggagaaattttatattaatatgtttgaattttattgatttattatttggagttattttttagttgttgagttaagaaatagaaaaaggagtttggggtttttgatttttttattaggtttaggggagtgagaggagggtttagatacgggtagggttttttggttttttggtgtagtttcgttgagttatttttttttttggttgggtgatttttttttgttgttttgataatttttggaggagaaatagatggggtttttgggttttttttagttttgtagggtggggtttttgtttttttttttgaagtttatttgttgttgttataagttttgtttttttcgttttttttttgaattttgggtggtgtaggaattagttttgtttagtggatttggggagaattggaggggaaattcgttgtgttttttgttaagttagtattgattttaataatttttttttttagtttaattttttaaaagtttaaattgaaaataataaatttatttttttatgaattagattttgtaaatagatgtttattttttgaatttgggttaacggggggcgattaggttttgagtgtaaatttgttagaaaattttagaggaggagttggaggttgataatatggtgaaaatttgaggtcgtttgttattttatttttgttattataggttattttttttatttggattttttcgttttagtatttttttaggtaggtgggaaaatttagtattttttatttttatttttttagtatattagtttttttattttttttaaatagtataatatttttttttattattttttatggagtttttttgtttatttttgttttattggaataatttaggttatatttttatttttatggagtgatttaaatttttttgaatggaatgtagattagttttttttagttttaataatgaatattaatttaatatttggtggtattttgttattacgatgttgtttttaatttatgatttttgattattaatttttttttttttagagtggttttaggttgtgtttatatattttttgtttttttttttttggttttttttttatttatatagaggggtagtttttatattttattaagggtttttagatgtagttgttgtcgttgtgttttttttagatggtttttaaattaggtttggttatgttgtagtagttttagattttgttatagggtattttgttttttttttagagtttgtattttgcgtagttgggaaaggtaattatagaggttgatttttacgttatagtagggttttgggttatggttttttttttttatttttagttgggtttattgtgtggttattgagtgtgaatttagattggttattgaggatttggagggtaaggggaggtaggcgggaatattgtgggtttttaagtttaatggaaatataaagggtagatttattgagagagtttttttgggattttttgttgggttgatatttatttaaaggaagaagttttgggtttttgggttttggcggtttgtttttagcggtagtagtaggattgtgtagggagtttgtattaagggtatttcgttagagttttggttttttatggttttgaggtgggaagggtggagttatttttattggtgtagttcgggttggttttttttttttatttttgttttgtatttattttgtttttgttagttttttaggtttttttttgttgtgtttgtttgaggttggggtgtttttatttgagaagagagattattttttttggatttttttgttttttttttaatttgttttgtagggtttttttgaaggggttcgtttttatgaagtattttggggtagaattcgggagtttttttatagtaataatattgtatttttattgaggtagggtaggtttttttgtggatttttgttttgtgttttggattttttttagttttttgttttgagattaaagaaataatatttttttttaaaataaattttatttttaatatgaaataaaatttttagagaaattaaaaattttgcgtttgagggagataaggaaataaagagggtatggtagtttatcggagttttaggaggttggggaggatattggaaggatttttagaggatgttggtggtagtaggtagtattttttggtttatgaaaacgtttaagtttaggttaggattttttaaatttagttttataaatttatttattaatgtttggtaattgaagaagagagaaaatcgtaagatttatggtagaatggataattaaatttttgggtagaggggagaggttgtggtatagaaaatttgggattttgaagatttagggattttagaaagaaatggtgggtttttgaagggtaaagtgttggaggaaggttgagtttttgaaaaggggagaagagttgtaggagaagatgtagagagggtaaagatattggggttatatacgtatttttttatttggtttttttttagtaaatttttgataggtttgatgggttttttattgcggattaagtttgagatttaggaataagtaagaaggtgggaggagtaaggggagtggggaagagaaggggaaataagggttagaaattttgtggatttagatttaggtttagtaggattaggaatgaaagggagttttgatgtggaggtggttgtatatttggattttattatttttttgttacgagttataagtttgttaggaagtttagtttgggtagttgtgtgggaggtatggttggttttcgtaatattttcgtaaatttgatagaagaagataagatcgttgttatttttataggtttttatggttttaaaagagaataaaagatagtgtattattaattattttttttttgttttgaaatttttggttaattttgtggggagggagaaaagggaagggatgtggtttttgtgttgagggagtttttgttttgatagaggagttaatttttatttttgggaaatgtttagtttgggggttttcgaggagttagattggtttttttattaaatattgtattaggggtttttgtggtagtagttgtagttgaataaggtttagaaagttggtggttataaagatgtgggggtatgtgggtttacgtgttagttagtgtcggagtatagcggttagaagcgcgagtttatttatttgtaaagagggtagaggttagtattcggagttatggggattttatatgtttttttgtatttgtattgtttttttttgtttcgtgttttattttttttttgtttatatagttttattttattttagaggtttagttttattgttatgtttttttatttttttttatttttttttttttagtttttttttttattagtttttttttttatcgtgttggttttttttttaaatttattaataaggattagcgattgtgtagtggtattgtttattgttttcgttatttgttgggtataaggtggataagggaaagttagtattggaagttcgtaacgtattgattatagttggtttgtgaataaagttgtatatatgttttttttattgtattgtaagtttttgaatggtgaggtgtacgttttgtttattttttttgttaatagtgatttatatgaaataagggtttaagaaatgtttatggtattgattttttttatttttgattttagtgttttttatttttagtataaagggtatgtagtagagggtatgtttttttgttatgagtatttttaggggttttttttttattatttttttttttaattttatttttttttgttttttttgatttggttgaggtcgattatgaaggtggagaggttaagggagatggattcgtagttatgaattcgtgtgaagatggcgtttattgttttaatttcggttttttttgttggtataaagttgtttattagggttatgaatgtgattaagtttatttgaatagggaaggagatagggtttggggtttggtgtcgtgggttgaggtgaaagtgaggtttaaggtatgaatggtatattaaagagaaatggatagggtgaaataggagaaataggtaatagatatattgattttgtttttttttttcgaattttgattatagttttgtgggttaatttagaattagtgaagaggtacgggacgtgggtagagatatatttgggagtggtgtgtatttatttagaggtaggtgaaggaatttgggttacggaaagttttattagagtatggttttttagtggagaataagaatatgtgaggtggaagtatagggatgtgggtgatggtttttttatgaagagcggggttagaaaatgggagaagagttgtaggagtttgagttggttggtaagtaggggtggagtagatgtaggagacgttagaggtttaggttgtagggtttttttttatttgtttgaggtatatgtttttttttgatgagttgggtttagtgatgattttgattttttttttgtttttattatattttgtggagttgggtataaaggttcgggtatagagttttattagaggatgtttgtagtgggcggagaggtatttcgtatggtttgtggattaagatagatgaatttttagaagatgtagtttttgggttttttatgtttatttttttattcgtttttatttttatttgttattttggattcgtattttaaggatttgtggggagtaacgcggttttgagtagttatagtttcgggtagtattggtaagagttagtaggacgtttaggcgggaggtaaggtttaatattcgggttaagatagttgttcgtgttagtatttggtattgtagttggtatattagtagcgttttttggtttgggagtgggtgaggaagggagttggaggttagttttaggggaaagtgaaggagaggtagaggtttttagggggatttggaaataggttgtagatataatttgagattttaagatatttagaggaaaagatagagttagagtgagcgagatagagagtaggaagaggaggggtttgttggaagtatttttaagttgtttattttttttttttttttggttgttgttttttttaaatattttataatgtatataatttttggtttttttttatttcggatttcgtagtgtaggttttttagtaatgtatttagttttttggttcgggtattacgatagtgtagttttttttttgagagaaattgggtataggggtttaaagttgtggattttgtattttttggtttttttttttttttttatttttttaattttatttttagtttttaattttgattttttttttttttgttttagtgttggtaaagtttagagtaaaattatagaggagagattttatattgggtagtgttgttgtagagtaacgtttttttttagttgttgatttattttttttattatttattttatagaggttgagggttttattatgaagtttagtttattaattttaaagttattggtttttattatggaaggtaggcggggaatagaaagaaggaagttaatttggggagagtaaagaggagatattttatttttttgtttggagatttattggatatttttttattttagagggagtttaaaagatttttgtatttttataaaaaagtgtttatgttttttaggttgttttataagtttttttatttattagtatgttttttataagtttaatattttttttaaaagatatttgaaggttatatttatttttttgtttttattagagggatgtagatgatattgtatgaaggaatacgggagtttagattttttagttttttgcgggtaattttagtaaggaaattgggaagttttattagttttcgtttttttacgagggtggaagatacgtggttattaaaagtgagttttttgttttggttgttatgaagatttttagttgtggtgattatttgttaaggatggtattttattattgcgtagggtttataggtttatttatatttaatatttatttttattaattttaggatttatgttggggaggattgtgaagcgatttttagtaaggttgtttttaaagtttatttgaggagataagtattgttttttaggatttggtattttttgttttgttttttagttttttttgggttttaattttttttgtagtttttttttaatttttattttttagatatttttttgaagttttgttgtttttttttattattttattttttatttaattgattttaatattttttatgtttttttattttgtatattgtattttttttttttgatttttttgggtgtattttttttttttttttatttattatttttttaatgaggttggcgatatggtgtaggttattagagaatttttgggtaatgtttcgaaagagttggatggattgcggtagggagcggtaggtattttttaggtttagggtattgtatatagtttgtgagagaaatataaaaaggaggataggttatatttagttcgggttgaggtggtgatagggatagatttagaagaataaagattagtagggaagattatagtaataaagagggaagattttaaaggtaaaaagaaatagtgagaggtattgtattaaatattgaaattataaagataattaagatatggttttggttaggtatagtggtttatgtttgtaattttagtattttgggaggttgaggtgggtagattatttgaggttaggagttcgagattagttttattaatatggtgaaattttgtttttatttaaaatataaaaaattaattgggtttggtggtatgtatatgtaattttagttatttgggaggttgaggtaggagaattttttgaattcgggaggtggaggttatagttagattacgttattgtattttagtttggtcgatagagcgagattttgttttaaaataaaataaataaataaaaaaagatatggtttttgttttagatgtgtttatagtttaggaaggaagatagaaatatatgtagaagatttaaaagtgaggtggtaggtgttttgatagagggttgtgtaaattttaaaataaaggagtttgtatagagtcgggagaaagagaaatatagttataaaaggttatgagtttgtaatgatataagaagaataatgataaaaaaattttatcggttattagggtcgggcgcggtggtttatatttgtaattttagtattttgggaggttgaggcgggtggattacgaggttaggagattgagattattttggttaagagggtgaaattttgtttttattaaaagtataaaaaattagttaggcgtggtggcgggcgtttgtagttttaggtatttaggaggttgaggtaggagaatggcgcgaattcgggaggtagagtttgtagtgagtcgagatcgcgttattgtatttttgtttgggtaatagtgtaagattttattttaaataaataaataaataaataaataaaaaataaaaaaattttatggttattttggagaatgttagggaattaatttattatattgatagttagtaaataaaggtggggggtgtttatttttgtagtatatatattgaaatttcgaaggttatagggattagtacggttattgggtacggatgatataaatttaagaagcgttttatattggggaaaaaaaaaagggttgggtatggtggtttatatttgtaattttagtattttgggaggtcgaggcgggtggattacgaggttaagagattaagattattttggttattatggtgaaattttgtttttattaaaaatataaaaattagttaggtatggtggtatacgtttatagttttagttattcgggaggttgaggtaggagaattatttgaaatttaattcgggaggtggaggttgtagtgagttaagattgtgttattgtattttagtttggtgatagagtaagattttgttttaaaaaaaaaagagtgggggaaatattaagtaattttttgtatttttatatgatttttattatttggtaattaaatagtatataaaaggaagtttttttttatagaaatttttggttaataaatgaagaaagaattagagatttaaatgttattattttgtaattgttaaagaattaatagatggttgggtgtagtggtttacgtttgtaatgttagtattttgggaggttgaggcgggtggattatttgaggttaagagattaagattattttggttaatatggtgaaatttcgtttttattaaaaatataaaaattagttgggcgtggtggtgtgcgtttgtaagttttagttatttaggaggttgaggtaggagaattatttgaatttaggaggcggaggttgtagtgagttaagatcgtgttattgtattttagtttggcgatagagggagatttattttaaattaaataaataaataaataaatgaataatagatttaggtattaaatattagaatatttgttaatattagaaaaagagagataatcggatatattagatattatgtttttttatttttaaaatagtattgaaaaaaaaaaaattttgaatttaattatgtttttagaattaaatattaatttatagaaattatagaagagagagaaatgtgttaaaaatatttaggaaatgtaaatagtaaaatttaggttaatggaaaatattataagataaataataatttagtttttttaataaattgttaggagaagaaaaagagaaaaagaaagaaagaataagagagaaaagatagagaaggaatcggtagattaaaaaggattagggttattatttgattgggtatcgtggtttatattaatagttttagtattttgggaggtttaagtaggaggattatttgagtttaggagtttgagattattttgagtaatatagtgagattttgtttttataaaaaataaaaaattggttaggtgtaatggtttacgtttgtaattttagtattttgggaggtcgaggtaggtagattatttgaggtcgggagttcgagattagttcgattaatagggagaaattttgtttttattaaaaatataaaattagttgggcgtggtggtacgtatttgtaattttagttatttgggaggttgaggtaagagaattatttgaatttaggaggtggaggttgcggtgagtcgagattatattattgtattttagtttgggttataagagtaaaatttcgttttaaaaataaataaataaataaataaataaataaataaatgtaagtaaaaaataaaaatttagttcggtgtgatggttattatttgtggtttttgttatttaggaggttgaggggggaggatcgtttgagtttaatagtttgaggttgtagtgagttataattgtgttattgtatttaagtttgggtgatagagtgagattttgttttaaaaaagaaaaattttagatatttgatgatattaaataatataatttttaaagtaagataataatattgttattttttttaaaaaataatttttttttagaaattattttgaaatattggtcgggtgaggtggtttacgtttgtaattttagtattttgggaggtcgaggcgggtggattacgaggttaggagattaagattattttggttaatatggtgaaattttgtttttattaaaaatataaaaaaaaaatttgggtatggtggtatgtgtttgttattttagttatatgggaggttgaggtaggagaatcgtttgaatttgggaggcggaggttgtagtgagtcgagattatgttattgtattttagtttggtgatagagtgagattttattttaaaaaaaaaaaaaaaaagaaaaaagaaattatattgaaatatttatggatgaaatgatataatggttgggatttgttttaaaataatttaagaaagttaggtgtagtattttaggtttatagttttagttattttggaggttaaggtgggaggattgtttgagtttagaagttagaggttgtaatgaaatatgattgtattattttgttttagtatgggtgataaagtaggattttatttaaaaaaataaataaacgataataaaatttataaaataatttaagaggggaaagtagaaaaagatatagatgatatatattaggttgggtacggtggtttttatttataattttagtattttgggaggtcgagatgggtagattatttgaggttaggaatttgagattagtttggttaatatggtgaaattttatttttattaaaaatataaaaattattttagtgtggtggtgggtatttgtaattttagttatttgggaggttgaggtaggagaattatttgaatttgggaggtagaggttgtagtgagtcgagatcgtattattgtaatttagtttgggcgatagagtaagattttgtttaaaaaaaaaaagaaaaagaaataaaaaaaaaattggcgtaagttaaagtgttgaaattgtatggtgggtatatgggggttaattatattattttaaatattttttatatttttttgaatataaagttaaaaaaaaaaagagggaggtcgggtttggtggtttatatttgtaattttagtattttgggaggttgaggtaggtggattatttgaagttaggagtttaagattagtttggttaatatggtgaaattttgtttttattaaaaatataaaaatttgttaggtatggtggcgggcgtttgtaattttaatttttcgggaggttgaggtagaattgtttgaatttaggaggcggaggttgtagtgagttaagatcgttttatggtattttagtttgggcgatagagcgaggttgtttttaaaaaaaaaaaaaagagggtagaataaaattggatagtatgtttagggtatagatagtttggaatataggttgagggtttttatttggatttttgggatttaagaaggaaggttttattttgtagagaatttgttagtcgttgattttggtgtgggataattttatgcgttttagaattagttatagttagataaggttatagtcgttgttttttttttttttattttaatgttttttaagaagtttattgtttagtattagtttttaatttttttttttatttttttgttttttattttgggtttataggtacgtttttgatgtgatttaggagtcgatgtagtatttgagttatgtttagattttggggtagtagaaaaaattgaatgacgtttagacgagaattgagtttttttaggttatgagtcggacgtgtgaattatagtttggaagtgagggtttgggtgggggtattataagttatatttattattttgattttagtttgttaaaaagtgtgtttgtagtttttggggattgtggtaatatgtatttacgatgtgttatgggaatgtagtggtaagtgtagtgttttatttatttaggtgtgtttatatgtatttattgaaaattgttagatgtgagtataattgtgtttatatattatagttttaacggataagatcgtgtgttattttatgtatataagtaacggagtttgttaatattttagaaggagagtagtgtgttgaggtatttgtgtgttaatattgtagtttattttgaggttgagtaagagacggtgagttagtatgagtttgtatgtttttttagttgtgaaagtgtttttgggtaatagtaatagatatttatttttttatattttttttgtgaaaatataattgttttattagggatgataagttttaatttataataatggttaatattgtagagaaaaaaggattggggagggatatttaaggggttttaataataatgttttattttttcgtttttttttttttttgagatagagtttcgttttgtcgttaggttggagtgtagtgatgcgatttcggtttattgtaatttttatttttcgggtttaagtgattttcgtgttttagtttttcgagtagttgggattgtaggtatgcgttattatgtttagttaattgttgtatttttagtagagttagggttttattatgttggttagaatgatttcgattttttgatttcgtgatttgttcgtttcggtttttaaagtgttgggattataggcgtgagttattatattcggttaatagtgttttattttttttttttattttattttttatatagagttttgttttgtcgtttaggttagagtgtagtagtataattttggtttattgtaatttttattttttaggttttggaattataggtattcgttattgtgtttagttaatttttgtatttttagtagagacggggttttattattttggttaggttggttttgaatttttgattttgtgatttattcgtttcggttttttaaagtgttgggattataggtatgagttatcgcgttcggtatgttttatttttaaattggttgatggatatatagatatttgtattattattattatttttgagatggagttttgttttgtcgtttaggttagggtatagtggcgggatttcgggttattgtaatttttgttttataggtttaagtgatttttttgttttagtttttttagtagttggaattataggtgtgtgttattatgtttagttaaattttgtatttttagtagagatagggtttcgttgtgttggttaggttggttttaaaatcgtgattttaggtgatttgtttgttttagttttttaaagtgttggaattataggtatgagttattgcgtttggttatttgtattattattaatagtttttatagagacgaggttttgttatgttgtttaggttgtttttaagtttttggttttaagtagtttttttgttatggttttttaaagtgttgggattataagtataagttattgtatttggttcgatagtattattatttatatttttttttttttttttgagatagagttttgttttgttgtttaggttggagtgtagtggtgcgattttagtttattgtaattttcgttttttaggtttaagcgattttcgtgttttagtttttggagtagttgggattataggggtgtattattattttcggttaatttttgtatttttagtagagatgaggttttattatgttggttagtttggttttaaatttcggatttttggtgttttatttgtttcggttttttaaagtgttgggattatagttatgagttattacgttcggttaattatttatatttttttgtgtgttggaggtattttttaataaatgaaaataaatttaggttaggtgcggtggtttacgtttgtaattttagtattttggtaggttaaggagggcgggttacgaggttaggagattaagattattttggttaacgcggtgaaatttcgtttttattaaaaatataataaaattagtcgggcgtgttggcgggtatttatagttttagttattcgggagggtgaggtagaatggtgtaaattcgggaggtggagtttgtaatgagttaggttattgtattttaggatgggtgatagagtgagattttgttttaaaaaataaataaataaataaaataaatttatatatagaaataaatgttttatttgtgtttgtttaatttcgggtatttttgtatatttattggttatgagagtgtgagattttgtagggatttgtgagtttataaatttttttttatatagaataagtattaaggatgttattttatataagagttaatatgtgtatatattaggttttgaagatttgtattttatattgtagtttgtggttagttattttgggttagaatattttagatttgaatgaagcggagtatttagatggttttaagggtgggttttaggtatttttgttttttggttattgagggtttttattagaatagtgtaggttagtttgtaaatagttatttttattttagaaagtatatgcgttgtattaaatatttaggtatttttgatttacgttttgttcgtattgggagagattttagttaaattaaattgtaaatttaataattgagaaaatgaaatcgttaaaagataagtaatttgtttaaagttatatcgttaatgagaatagttaagttttaaaattatgtttttagatttttaggatagtgttttttagagtatattgtgatatttagttatatttttggtgtttgtatagtttttagtttttgaatttttggttttaagtaatttttttgttttagttttttaaatgttgggattataggcgtgagttattatatttggttttatattattatttatatttttttgtacgttagaggtattttttaataaattaaaataaattcgtatatagaaatattaataaatatgttatttgtttttagtttattagattatatgatgattttttaagttatatgattttatgttttgtttgattttatttggggaatacgtattttttttcgattttaaatttagtttttttttttattgagaatttttttttttttatttgtggttgagattaaagatttgtatttgaagtattgaagaatgtgtgggtaattaaattattttgtcgatttttggagatgttgattatttggagatgattttagagattattttaaattaatttttataagatatatattgtagcgggaggtgaggtaggggaaggattgtgtatttgaggttagtaaaggtttttattttgtttagagatgatgttattagtgcgtttatatttgcgttgtgtttatatattgagtgttattatgtataagattatgtgttagatattgaggtaataggtatagttattagatagagtttatagttatggaggtaagtagatttattgattgttaattttaatatgatgtgatagtgtaattagaaaaatataaataagtattatgtgagtataaagaaggtgtatattaattttttataggtatttgtaaaagttaaagggtaatagttggattgtattttgaagaggatgtatttttttttttttttaagatagaattttattttgttgtttaggttggagtgtagtggggtaatttgggtttattttaatttttatttttcgagtttaagtaatttttttgttttagttttttgagtagttggtattagaggtatgcgttatgatgttgggttaatttttgtattttcggtagacgtgaagttttattaagttggttaggttggttttgaatttttgattttaaattatttatttattttagttttttaaaatgttgagattataggcgtgagttatcgcgtttgatttggatgtaagattttgataggtatagaataaggaaaagattttttaggtcgggtatagtggtttatgtttgtaattttagtattttgggaggtcgaggtgggtagattacgaggttagtagtttaagattagcgtggttaatatggtgaaattttatttttattaaaaatataaaaattagttaggtatggtggtgggtttttgtaattttagttatttcggaggttgaggtaggagaattgtttgaatttgggaggtggaggttgtagtgagtaaagatcgcgttattgtattttagtttgggtgatagagggagatttcgttttaaaaaaaaaaaaaaaagattttttagaaggagtagtataaatataggtatgatatgtttttataatggtaagtggttttaaatgattagaatataaggtagatttagtaggaaaggatttagaaggggttttggaaggtgagtttggaaattaaaattggggtaaacgtgatggattttgaatattattatattgtttaagatgttaattttaattttgaaggtaatgggaaaattttttaaggtttatgttattttttttttatttaggttatttaaaaagtggagtgacggttaggcgtagtgatttatgtttgtaattttagtattttgggaggtcgaggtgggcggattattaggagttcgagattagtttgattaatatggtgaaatttcgtttttattgaaaatataaaaattagttaggtgtggtggtgggcgtttgtaattttagttatttgggaggttgaggtagaagaattgtttgaattcgggaagtggaggttgtagtgagtagagatcgtgttattgtattttagtttgggtaataagagcgaaatttagttataaaaaaaaaaaaaaaaaaaaaggagtgatatgtttagatttttgttttggaatgataggttttttgtttttagtattaatttaaggtttatggtttgagaaggtgtattgttagtaatgttattaattagtaaagggaatgtaggaagaggaatagatttggtgggtattagtttggatgttttgagtttgagttgtttgtgaaaattgtaggtggtgatatgtaattaatatttatatacggagtttaaaattagagatataaatttgagagttattatagaaatgtgaagtgtgttttttataattaaagataattatgttaatatagttatgtgttatattagtattttttttttttttgagacggagttttattttgttgtttaggttgaagtgtagtgtataattttggtttattgtaatttttattttttgggtttaagcgatttttttgttttagttttttgagtagttggaattataggtatttattaatacgtttggttaatttttgtattttagtagagatggggttttattatgttggttagttggttttaaatttttgattttaagtgatttatttattttggttttttaaagtgttgggattataggtgtgagttattgtgttcggttttatattttgtgtttttttttgttgtttgtatgtgtgtaagtttgtgtattattaatgggtatatgtgtatttgcgttgataataaaaaatgagatgtatattagttattatataaagttgttataaggatgaaatgtagttagttagtgtttagtaaagggtagttgttttattattattaggtggggtggtgtatgtgagaatttgtatattgttattagtaggttttagtatgtagtgtgtatatggaatttatgtattagtgtgtagtatgtgtgggatttatttatttgagtagtttttttttttatttatagtggtatttgttgaggatttttgtgagggataaggtagggagtgaatttgttataaggtagggatagggaatggaatgtgtttatgtgtttaagttgaggtatttaggttagaggtgttggttgttgaggaagttggtttgggagggtataaaggtagttaaagttggtgtttggttataaatatgagttgggattatcgtatatggagatgggggaagggatggatatttatagggatatttagttagaaaaatatataaagtagatttagttaaaatttaagaattggttaggtacggtggtttacgtttgtaattttagtattttgggaggtcgaggtagacggattacgtggttaggagatcgagattattttggttaatatggtgaaacgtagtttttattaaaaatataaaaaattagtcgggtatggtggtaggtatttgtagttttagttattcgggaggttgaagtagaatggtatgaattcgggaggtagagtttgtagtgagcggagatcgcgttattgtattttagtttgggtgatagagtaagatttcgttttaaaataaaacgaaataaataaataaataaataaaatataaaaaatttaagagttttttcgtttttttaaaaatataaaaatttaatagttggtcgggtagggtggtttatgtttataattttagtattttgggaggttaaggtaggaggattatttgagtttaggagtttgagattagtttgggtaatatggcgaaatattatttttattaaaaatataaaaaaattagttgggtatggtggtgtaggtttgtagttttagttatttaggaggttgaggtaggatgaggtagaagaattatttgaatttaagaggcggaggttgtagtgagtttaaattgtattattgtattttagtttgggtgatatagtaagattttatttaaaaaataaataaataaataaaaaatttaagagtttaatatatatatgtaaaaaattggacggtcgggcgcggtcgtttatgtttgtaattttagtattttgggaggttgaggcgagtggattttttgaggttaggagtttaagattagtttgggtaatatggtgaaatttcgtttttattaaaaatataaaaattagttgggcgtggtggtaggtgtttgtaattttagttatttaggaggttgaggtaggagaatcgtttgaatttaggaggtagaggttgtattgagtcgagatcgtattattgtattttagtttgggggataagagcgagatttcgttatatatatatatatatatatatatatatatatatatatatataaaattggatataattggttaggcgcggtggtttacgtttgtaattttagtattttgggaggtcgaggtggacggattacgaggttaggagatcgagattattttggttaatatagtgaaattcgttttttattaaaaatataaaaattagttaggtatcgtggtgggtatttgtagttttagttatttaggaggttgaggtagtagaatggtgtgaatttaggaggtagagtttgtagtgagttgatattgtattattgtattttagtttgggcgatagagcgagattttgttttaaaaaaaaaaaaaaaaaatttggatataatttattgagatatgaaattatatggatatttgcggagatgtttttaatatattttaaagttagagataattgataaagattttatataaattaaataggtagttatgtagttataaaatttttttttatatataaggttttttaaagtttttaataggtatttaattagtagaaatatttatataaatttagggaaggaatatagaattggtaaagtaatggttgatatgtaataatattgtatagttataaagtatgggaagatgtttaagtttggggggcggggggtataaataggtaagaaatttggattggtatgaaagagatatttgataatgggagtgaagtgggaagggaggttgggatatatttttggagttaattgtttttttggtaggtttttgtaatgtgagatgagggatggggtatatttattaaagaggttgagttttttttttagtttattggttattttgtatattgaggggtgagatttatttttaaaaatttgtagaatattgtcgaggagaaatggaggagtttggggtaatttggatttttgaagggaataagaattgaggattgataaatggaatggggataggggatatttttttgagattacgttttttttttttttttttttttgagatggagtttcgttttgtcgtttaggttggagtgtagtggtgtaattttagtttattgtaatttttgttttttggatttaagtaattttgttttagttttttgagtggttgggattataggcgtataatatatttagttaatttttatatttttagtagagacggggttttattatattggttaggttttaaatttttgattttaggcgatttattcgttttggttttttaaagcgcggggattataggtatgagttatcgcgtttagtcgagattatattttgatgtaaggtttgttttttatttttttttgttttagtttttttttatagaaaagaaagttagtatttttatgttttttttttttttttttttttaaaatttttttttttttttttttaaggagagagattttaatagttttaggattagggaaattagagttttattaggattattggggtattaaatttaatttttttttttttttagagatagtagtatgtttttatttttttatttgtaagtgttttgatttatgtttattagatgagttttgaggatagaaaataaaaaagtaggaagtagtttgagttcgttttataattttattttttttgtttttttttttgaatattgttttagttttttttttaaagttttattagtttttagattttttcgggtgttttagagtatttgatttattgggttatagttatatttatattttatttttattttattttttaggttttttaattttatattattttggttggggttggggtgaattatttataatataaattttttaaagtttaggatggggacgttgatattatagttttttagtttaatttcgattttttttcgatttaggaattttagtagttttttaagtgttcgaatttgggaggggattagtagtggaatcggggtaaattttaaattttttgggggttgtagagtattagggaaagttattattttttagggttaggttagtattttttagaatttagttttagtatttgtgtcgttttttagtttttattttttaggattaattttattgtgaggaggtagttaaagggaataatggaagagaggaagaggatttttttagtggtagttatggcgtttgggatgaaggagtagtttttagaaaggaggcgttgtttgtttatttttagatttatttgagggaggtaagtaaagggaacggttttgtagtttaatttttttattttattttaagaatgagataatagaagtaagagagattatttgatttgtttaagtttatataggtagttaatggaaagttagagtaagaattaaatttttagatttttagtttaattttttttttattttatatataatataaagatatttgtttgaaagtatagtttgagaaagataaatggttgaggaaagtagatatttgtttggaattgaggattttggttaaaataatggtattaatagaattagtaatattaatgttttaatatttaattaggatagtatatttttgtttttattgtaaatttaggaaagttatagaagtgttttatggattataataagggttattgaggtagtgttttttggtttggtgataaaaggttttaatttaatggggagaattttaataataaaattttgtttaaaaagtgttattattttttaggggaggtttttatttttagatatgatttaagtagaggttttttaataagttgtaggttattaaagggtagggagtaggagagattttggggggataggttatagggtatgaggagtataaaggtttaggatgatataaggtagaggggagatttgtgatgatgaaggtagagttgggggaaagaatgggatatcggaatagggagttaggttaagtaaaaggaaggagatattaaaatttatatttggtaaaaatatgattttaggttttttaggttttttgtgtttttgggaggttgtgggggaggaaagaaaaggttattattttttatattttagtttttttatttttgtttgatatttttttttatttaattttagttttttggaatattttatatattagtttttttttattttttttttattttttattaagtttttattaagtttttttagaaatcgagttatatttttattttgtttggtattcgtaataatagattggggattgattttatttagaatttggaaggagaatagagattaaatgagttaaaggatttttgtttttgattaagagaaaatttatagtttttttttttttattttttttttttttaaaaatattttttttttaggagtagggagtgttttgtatagtgggaatataggtagaagttgagatttagaaaagtagttaagagtggtgggatggtgagagggaagtgggatgttttggatgttgttattaggttgtaaatttttggagaatagatatgattgatttgtttagggttgaatttgaagtatttgaaatattgtaaatacgttatatatatttgtggttaggtatagtggtttatgtttataatttttgttttttgggaggttaaggtaggtagattattggaggttaggagtttaagataagtttagttaacgtggtgaaattttgtttttattaaaaatataaaaattagttaggcgtgatggtagatttttgtaattttagttattcgggagattgaggtaggagaattgtttgaattcgggagacggaggttgtagtgagttaagatggtattattatatttttagtttgagtgacggagtaagatattgttttaaaaaagaataattaaataaattaaaaaataattttataaatatttgttaaataatgaaatgaatttataaaaataaaagagggagtttttgtgaagtaattgtaaaatatattgagttagtgttatagtttggatgtgatttgtttttgttaaatatcgtgttgaaatttaatttttagtgtgatagtgttgtgaggtagggtttagtaggaggtgtgtgggtgatgggagtggatcgtttatgaatagattaatgttttttttggagtgtgttggtgggtatgagtgagaggtttttattttattagtttttgagagagttggttgttaaaaagagtttggtattttttttttttttgttttttttttgttatgtgatttttatatattttgttttttttttttttatgagttgaagtagtttgaggtttttattagtgaagatgtttaattttgagttttttaattatttagaattataagttaaataaaatttttttttttttttaataaattatttagagttaggtatttttttatagtaatataaaatatgttagatagtgaggtgagttaatgtaagtaaaatatggttgggcgtggtgatttatatttgtagttttagtattttaggaggttaaggtgggcggattataaggttaggagtttgagattattttggttaatatggtgaaatattatttgtgttaaaaatatatataaaaaattagttgggtgtggtggtatacgtttgtagttttagttattcgggaggttgagttaggagaattgtttgaatttaggaggtggaggttgtagtgagttaagattgcgttattgtatttgagtttgggtaatagagtaagattttgtttagaaaaaaaaaatatgtgtgtgtgtgtgtgtgtgtgtgtgtgtgtgtgtgtgtgtgtaatatatttgtaattttagagagtagaggaatttatggttttatttttatttttttggagaagtttgaggttttcgtggtttggggtatttggtatgaagtggatagtggagttattagtattatagtaggtaatgtttaagtattttgaattttatagtatatatagatggatttgtttagtaaggaagaaaggaaattattattagaattatttataagtgtagggtttattatgttttatataatttaattatttttttaaatttttgagataggtattattatttttatttagtgaatgtgaaatagttatttaggaggtaagagatttgtttagttttttttaattttgttttttttttttttttttttttgagacggagttttgttttgtcgtttaggttgaagtgtagtggagtaattttagtttattgtaattttcgtttttcgagttatagtgatttttttgttttagtttttttagtagttgggataataggtacgtgttattacgttcggttaatttttatatttttagtagagacggggtttcgttatgttgtttaggttggtttttaatttttgagtttaggtgattcgttcgttttagttttttaaagtgttaagattataggtgtgagttatcgcgttcggtttttaatttttttttattttaattttttattaattttttatttaagtttttattttttttagagatttcggttagttttttttttttttcgattttttttttttcggtttttttggggttcggtattggggtcgggttggggaagtcggaggaggtcgttttaggtttcggtttttgcggtgttttttttgggttcgtttttaaggaggttatgagtttggaggttttgcggatgtaaaaagtgagggcggttcggaagtaacgatttatagaggaggtcggggtagggtggcgcgtagaatgtaaagtattaagtatttttgttatagggttgcggggtagggttgaggggcgtggagagttgtggatataggaggtgaattttcgggtatttaattaaagtatagattgtgggaaattttacgcgttttatttttatttttgttacgcggaggttattttttggaaggaaggggtttgagggttttgtggggcgagtcgtgtacgttttatgtttttgtttttgttaattacgcgttaggattttagttttacgcgtttatttttttttttttttagttgtcgttatcgtagcgttttttcgtttttttagtaatttgagtcgttataggtgggagaacgtttcgttgatcgatcgttacgagtttgtaaaaggagcgcgtcggcgcgtgagcgaggtgcgcgcgtacgcgtttcgtttttttagtcgttgttgattggagaggttcggatttagtttagagattcgatagggcgaggaggagaagcggattgtcgtagttgaagagtttggacgttgattggtttatttgttttcggggcgggtttagaacgtttaaatttttcgttttttgtcgttgtttagtagtcgggtttttagtatttattgtttttgggatttgattggcgtagtgggaagttcgcgagaaggtcggattagggttcgtagttttagtttttggaaggggtttgggatcgttgcgggggttttgagggggaggttaaatttaaagagttagaggcgtttatttttttttttgtaataatttttaagttaatatttgtattttttgagttaatatttatatagagtttagaatagtgtttggtaaataaagtaagatttaaatgagcggtgttttaaataaataagcggaaataagtaggatttttgttttagttttatcgtgtttgttttttgggtatagggtatgattatttttataatggtacgatagggtttaatttattatttaaattttttaagtagaggtggaagtattcgaattatattaaattttggtagagagaagtagttttgattagaatatttatatttttattgggatatgtttatattttttcgtatttttatatatttttgaagatagagaggtatttattatttatgtattcggtaattatttagtgtttattttgggttaggggttggatttaaagcggtgaatataatgaagttattgttttataaagtttatttgtgcgtttgtgtgtgtgtgtgtgtgtgtgtgtgtgtgtgtgtgtgtgtgtgttgcgggggtggggttatgagggagaaagaaaaaaaatatatatatatatatatataatttttttaaatgtattattttttttagttttgtttttagtattttgagatggggagatttttttttagttttttaatttaagaagttaggaaagatggtgggggtgagatgatttagttgtgttaattagtaattggaaaattttttttagtaagaaaggtgggggaatagagttaagggttgggttaatggttatttttggtaaatttgttgagtaatggagttatagaaatttggaggaggttggtgatagttttggggagtgttagggagggatttattttttaatttggggtgtgaagagattagggattagtttattaagtttaggaaggggagggagtggaaagagaagtttagagagggaaagaggagttattgagataggagaaatgtagggatagggaggtgagatggagggaaatttttgttgtaggatttgggggtatagttttggttttgttggatggttttaggagagggtagcgttgtttgttatttggtaaattaaggtacgatattttgtgggtagttatgttagttagttaaagttaatattgatattaaggtagttgtagttataaagttgtaggagagaaaagagaggtcgggagaggttgttaaatttgtttgatttttaagttggttttatttatttaaggttttttttggatatagattagttggaataggagaggattttgagaagtagagttgttttgattttttttttttaatgggaaggggttttgtgtgtagattttgagggttattatgagggaatttatatttatatagaggtatggaattatatttttataggatgttatagtttaagggaacgaatattaaagatagtttttttgtcgggaggagagaaaaaggtttttttataagtaggagaaaatttatagaagaggaagtataagaggaaattattaattgttggtttttagtagtatattacgttattttattttattttttttttaagtttttttttttttttaagttttaagttttgttttagttttgtgtttttgtattttattatggttttttggaattgtaggttttttgttggatagagggtgatgaggaggatagagaagggatggttggataggagagaaatttaggatatggaggttggaattttgggtttatttttttagtaggttataaaggtttaatagaaattaaggttattggagagagagttgttttttttatgttttttttgtttatttatttaggtgtttttaaggattttatttttattattttgtttgatttttttttatttttatgataggattagttaataatatttttattttattttttatatatatattttaggatcgggttatgataattttatttttttgttttatttttaaggtaatttgttagtgagacgaggataaagggtataggaaggggttttaataggaaatataagtggaagtataaagttgattaagttataggaatagatttttttttgtaataaagttttttgtttcggttttatgtttttttcgtaaaagatttcgttatttttttttttatttttaattttattttttttttttttttttttttttttttttttttttttttttgagatggagtttcgtttttattgtttaggttggagtgtaatggtattattttagtttattgtaatttttatttttcgggtttaattgatttttttgttttagttttttaagtagttgggattataggtgtttattatttcgtttggtaaatttttgtatttttagtagagatagggttttattatgttggttagtttggttttgattttttgattttaggtgatttattttttttggttttttaaagtgttgggattataggcgtgaattattttattcggtttttaattttattttttatgtttaattttaagtgtaggttataaggattgtaagttttagtgttgagttgggttcggagatagtagattgcggggggtataggatttattgagatattagtttgggtagtttagggagtgttggcgttattttttttttaattttaggttgtatggttaacggtttttatttgtagttttagttttttattttcgagttttttttttagattatagttttagtaatttagaatttggattggagtttggaagaaatgtagaatgattaaacgattatttttttatttgaagtttttatttttgaatttttacgggtgtgtttaagttgttagtgttaagttttttatatgagggttagtcgggttgtatttagattaatgaagtagggaaattgaggtagaaaagagttttgtgtttaggagaggtcggagaaataaggaggtttttaggatttttttttaatatttttatttttattttgtgggagattcgaggatttttttttcggatttattttttatatcgtcgagtttcgtttttttttagttttttttttaggtttagggcggggtcggtcggtgagttagcggttttttgatttagttcgggagaggatcgagttggaggagttgggtgtggggtgcgttgggttggtggggaggtttagtttgggtgtaagtaggtttgattgagtttgtgttgtgttgaagggatagttttgggtttaggggagagagtttttgagtgtgagattcgtttttttcggttttagttttttttagtttttttagggacggttattttttggttttcgacgtaattatggttgaagaataatcgtaggtcgaattgttcgtgaaggtaagaatatttttttttttagttatttaaatttttggaagttaatttttatttttttttcggtttagttttaattttttaattttttttttttttgatttttatttttaattttacgtgtattttttggttgaggggtggttttgagaggggaagatattaatttgttagtaagtaatgagaattttaggattaattttgaaaagtttgtaaaagtgtaagtttttagtagattaaaggaagggaagtggagaaaaaggagaatttttaaaagtgagattggggtggggttagagggcgagttggtgaagggatagtgggggtttagtagggtttagaagggatagaggggaattttagttaggatatgtgtttttataagatttgagggtgagtagtgtagtaggagaggtgtgtgtgtgtgtgtgtgtgtgtgtgtgtgtgtgtgtgtgtggatggagacgttttagggaagacggtgtgttgagggaggtttgagagtgagagtaagtaaattgggaagttttggaggggcggaataaaataggagattgggatcggagtttgaaaagtagagttggagaggtgatcgggtggtattgaatatttttaggattggggaaagggatagaaggggaggtggtaagaagacgtgagtttaacgtagttattataaggatgggtgggagagagattagacggaggagaagagttcggttagggtattttgggatttgggggttggagaagtagaagatttgttttaatttttttttttttttgcgggtgtgggtaaggagagatggttttatggtatttgggtagtaaaattgtaggtagtaggtttttcggtgttatttagtttttttttgattgtagcggtcgtttttttttttatcgttgttgtatttattttttagttttgggattttttggttgtgttttttttttttttttttaatagtgttttttttttttcgtttcgtttgtgttttttcgttggtacgtacgtttttttattttttatttttttgtcgtttttttttttttttttttttttttgttttttttatttttgtgtgtttttgtttgtgttttttttttttttttgtttgggtttttcgggtagttattttttttttttgggtttagggaagtcggagtttgtttgggttcgtttttttaggtgtggtttttattttatttttatattcgttttcggggttatttttattcgtgggtgaggttgtgtcgtagagatttcggttttgtgttttgtgagaggatggttattgtagttagaggatttgtgttgggagattttggtaataggttaggggtagttttagttgtttaggttttatttttattgtttttttttttatatttttgataggaaggaagtcggagatagagagatgaattatttttagtttagggggaggtgttttttgggttaatgaggttattatttgttaattagagggtagtttttttttgtagggttttttatatttttagcgcgaggtttagggttttttgattagattttttatttaaagatattttggattggaggtgtagagaattaaaattttggtttttaaattttatttattttttttgtttttagattttattttttttaggaatttagaaatttaggtttttagtttataattttggttttattgaagttttatatttttttttttttaggatttagatttttttaagttttttaggattttttttttttatttattttttatttgtttttagtgtttggggaattagaagtttgtttttgtaaaatagttttttattgatttgttttaggtttgatttaggtttaagggtaaagagtttatagtgaggggatagtgtatgtgttatgattaggtagaaaatagttggtttgggagtgggaatgtagggattggtttagggatgggtggggtgtattaggtataattttgggttggggttattttttaggttggtagtgatggggttaagattgggaattgtttatttttttagagattgtttatggtattgtggtttaagggagttatttttaatgttattatcgttgatattaaaaggtaggtttgtttatgttttttgaaatatttttggtgtatatatgtgtgtaaatatatatttattcgagtttttttgttatgaatatttttgttttttttttggagttttttttttattttacgttttttattttttttttttggttttttttgatttttatttttagttttgatttttgattttttttttaggcggatcgagatagtgtagaagttgtgtttaggggggtagtttttatttttgttgtatggtattgaagtgtatatagatattaataagattgaggaatttttggaggtagtgttgtgtttttttaggtataggggtatttagaaagtggagaggtggagtagggagattttgggaaatagatagtttgtagaaatggaaaatagagatggtggtggggttggggtaggagagttagttgaggttttttttaggaagatattttattttattttttttattggtttttaggtattttaagttggtagttttgaattttgagtttaatatagttgggttggatatatttgttaaattttttgtttatattaagaatttaaatttagtatttaatgatagtgagttttgtgggttagaggtttgggttttgggaggaatagagaggatttagcgggtaggagatattaggggtatttggacgtttagatattagggagatgaagtagatgttcgtaaattttttttagttttttatttttgttttatttttatatttttttgtatttttattggttaagatttttaagttttttttatttgttttttagttttttttgttttattgaggacgttagttggttgttggtttgttttttggtagaatagggttatgtttaagaatagttattattttagatttagattatttgagtataaatttaattagtcgtataattttgagtaattattttatttttttgtaagtttatttttagatttataaaattaggatgataatatttattttatgggttgatataaatttttttttttttttttttttgagatggagtttcgttttgtcgtttaggttggagtgtagtggtgtaattagtttattgtaatttttgtttgtcgggtttaagtaatttttttgttttagttttttgagtagttgggattatagacgtgtattattacgtttagttaatttttgtatttttagtagagatagggttttattatgttggttaggttggttttgaattttcgattttaggtgatttatttgtttcggtttttaaaagtgttgggattataggagtgagttattgtattcggcgatataaatgagtttgtaaaatgtaaagtgtttattttgggaggtcgaggttagcgtattatttgaggttaggagttggagattagtttggttaatatgattggtttttattgaaaaaaatataaaaattagttagttgtggtggtaggtatttgtaattttagttatttaggaggttgaggtaggagaattatttgaatttaggaggtagaggttgtagtgagtcgggattatgttattgtattttagtttgggtaacggagtaagatttcgtttaatataaaataaaatgtaaagtgtttagaataatatatagaaaagtaattatatgagtgttagttattattattttggatttattattagtatttatttttaacgggttttttcggattatgttaatttttttttgaagttttaattagtttttttttttgtatagatttggagaagggatttttgaaagttttgaaggttttagataattatttaatatttttttttttagaagaagtggatgaaattagtgttgaagatgaaggtgttttttagaggaagtttttggatggtaacgagtttattttggttgattgtaatttgttgttaaagttatatatagtataggtgtgtggttattgcgggaggagaggatgattattggagtggttttttaaggagtttttatatgggttttttttgataattattttaaagacgattttttttttagggtggtttttataaattgttattaatggtagattttattttagttttttgtagtagttattgttaataagattattgtttgagataattatattttatgatgtaagttatgggtgtaaatagattagtaaagaggaatatattttagtattatttttgaagaatgttttttttgtttcggtattattgttaaatttttagattagatagagtaggttttttttaaagttaaagttttaattttttttataattttagtttttatttttttttgtggaagattaaaattgttggtttttatgtttttgttatagttttaaagttatggtttagtttgtgtaatatgggtttgatattagtttgttatataattatgtagtgaatatttgtgtattaagtattgaaagatatataagtgtatggtgattgggttttgtttttaaagggttgaaatttgagataataaaatatttatatgaaagttaagaatatatgatgaaaagttagatgggtcgggcgtggtggtttacgtttataattttaatattttgggcggttaaggttggtggattatttgaggttaggagttcgagattagtttggttaatatggtgaaattttatttttattaaaattataaaaattagtcgtatatggtggtgggtatttgtaattatagttatttgggaggttgaggtaggagaattatttgaattcgggaggcggaggttgtagtgagttaagatcgcgttattgtattttagtttgggtgatagtaagattttattttaaaaaaaaaaaagtttgatgaaaaatatagagataaaagttatttgtgttagtgtttgaagtggtatagggggaaaaagttattgtggaaatttaagaggagaattttataagtaaattatattttaagttttaaaaatttaggaaaaatggttggttattaaaagttaggattttagtaagtgagaaggaaggttaacgatagtataagatagtgaggagttgagttggttttattatgtcggtttggggagaagggaaagttaaggtggtttttttgggtttaatatgttggttttttttttttttttatttttaggtggtgtgtaagaagtatcggggatttattattttcgaggtttttcggggagtgtatcggtatttgagtaatgtttacgttcgggaagaattcgtttttatttgtttagatgatgaggagatcgagttcgtttatgagtaagtggtaaaggtttttaaataagttttttttgggatttttttaattttttttattttttttataaaggttttggtggtttttatattgttatttaatggatatattttaaaatggttagtgggtagggaattttggagtatttgtttcgggatggtgtggtggaagaggggatgagggaaagaaatggggggtttgggttagatttttattgtggggtgggatgagtaggataatatattttagtaataaaatatagaataaaaattaagtgtttttacgtaatgggggtttaaagtgtgggcgatatggaatgaggggtgggttagtgattttgagtttagggtagaagttaggaattaagaagggaaatgtttgtggtggggttgttatgtttcgtgtcggttcgtcggttcgtcgttgcgttgttttgaggtttacgaagcgtttgtagtttcgtcgttagggtcggttagatttgggtgggtttgggtagcgttcgttgggcggtgtcgatttttggtaaggggggcgtagtttggatgtaatgggcgcggtttagtagggcggaatgggcgtggttcgaagaagtttcgtttcgtttcgtttagataatgtttcggagtcgttagatcgtcgcgtttttgttttatcgtagtatatgagttcgtttatataaggattttcgttaaaagttagagtttttagttttcgaggtttgaagacggggatttttttttttattaattttgttttcggggggtggggttttagtcgagattatagcgcgataggagtgggggtggtcgttggaggtgagttttgcgtggggggttttgaatcgtgtgggggtcggagtttgggggtgtcgggtttatgtttgtattagatagagagtatggggagtcggtatttgggcgcggagttaggcggggtggattttgggatatagacggggaatcgggttttggagtcgggagtagtgttagcgtttcggaattacgttttttgttatttcgtttttcgtatttcgttttagattttttttagtttttcgggattcggtttggtttatattaggtcgtgttaggggtagcgtgattagttagggcggagagaggatgtttaattttttaggttcgaatttttttttttttatttattttttttttttttcgttcgggtatttaggatttttattttttagtttttgtttttttagttttttttttttgttttataatttttgcgggtttcgggttggatttttagtttttgcggtagcgagtagttgagggttaagggggcggggttgttgtatttttggggagtgagcgtattttagtggttgttaagaggggcgttcgatagggattttataagtttttaagtaggggtaataggtgttttggagattagagattttagttttgttttttaggttttttttaaagaatttgatttttgagggtgttgggtagagtgaggtcgataggagcggaaggtttggagtgggtggggcggagtgggagggacgtttagagatggtaggaggaagatttgggcgtttttaattatttttaacgtttttgtttgtatgtttttttttttgttttttttttttttgtttttttttttagataggtgaagaaataagaaaattaagaaattcgagcggttggagggggagtttgtgtggatgggatggggacgtcgggggaggggttgggtcgttgtttttatgttttgattcggggagttttagagagtttggcgtcgggggaaggtgcgggggttggttttttcgttttggatttggttaaagtttaaagggagtacggggtgttgggaggtaaattgaggtaacgattggggttatagttgttagaattgttatttgaggagttattgtcgttgggatcgttgtttggcgatacggtcgtgatttaaggggatacggttttaattacgcggttttggagtttcgttcgtaggttagaggtgagcgtcgtggcgcgggtgtggtatggggaaaggtagaaggaattggatgtcggggttttggggaagaattgaggatgggggtgttatagtttcgtgttttttttttttattttaaggtcgatggagttcgtaaagttttgtaagatttggggtttcgaattgtggaaataggagacgagaacgcgacgttggatggtattgacgttttttttatcggtgaggttggggggaggtataggttttggtatagggaagtagagtttgggagattcggtcgtttggagttttgtttttaatttattttcgtttttaaattttcgcggtttttcggatttaggtcgggagtttttcgtaggtttttttaaatggattaattatcgaggagttgagatcgtggcggatacgtttcgggtgcggagcgggattagtttagggagggagggggtgtaggtgggggtcggaagggtttgggcgttcgttgaggaaatgagaggtagagagtagtttatgtttgaagatattttattatttttttcgcgtttttgaatattttttttcgttttttttaggatttcgtcgtttttattgtgttagtttcgggttttttttatttgcgcggtttttgcggtatggggggatttcgtattgttgtggtaggtagtagcgacgttgtttaaaaggttgttcgggtgaggagggggcggggttaacgaaagtgggcgtagttttgggttcgggaggtcgggagttgggaggtttaggaaattagttttaatttttgtttttaatgggttgtttattttatatgaaagaatataggagaaaataagaagttataatagtaggattgggaataggggtgattaatttgttttttcggagttttaggaaattttaaaggtggtatttaaattgtgattttaaggatgggtaggatagataggaggggttggggaaggtagggggttgaaaataattgtatgtgattttaaggtggaaattagtaaaggtaattaaagtatttagtgtttgatatatcgtaagttttatgtgtttgttgttattattttttataaatgttagttcgtttttagtttttagtggtggttgagtaggtagatatagttgtggagaggttttgagattcgaatatttttttttttttttaggtaatggtagtgttgatagattatttatatgtttttttgatttttttagatgacgtagttgttgattgttttttttttcgttttgggttgtttggtgtgttttttttttttttgtatcgtggaggtggggatttgtttaatagttaggaggtgagagagggtaggaattttaatattaagtattattagagaaaagagttttaggtttttttagtgggaggaaggaagggtattttttttagaagtttgggtggggttattttgagttggttggaagagtggtttggtttagtttgaggttttatttttttttttttattttatgttttttttgtgtaggtattgtagaagttttttgatgttattttggtatttgtgttttgtttagaattggagaaggttggcgtcgggtttagttttttttgtttggtgtttagtatacgtttttatagttgagggtttggttttggggtattgttggttaggggtaggatagtataggaagtagaaggggaaggagggttagatagagaatgttgaataggtagtagttgggagagagttttaatattgggggaggggagagtgtagggaaaaggatttattgggtgaatttttttttttagaattaataaaatagaattgattttttagattgggttgtgattggtgttttattggggtaaagggatagggtagggttgaaatttgagtttggggttagtgtagggaagaaggttttttatttaaaaattttgttaggtatttattaatttattgtttaattatgttataggtatttgagtataagatgaataagatagaatttttattatgggaagtgtgtttagggtagagaaaagagtgtatgggtggattgtttattgaatttatttaaatgttagatgatttagagattggtagattattagtttatttttatttgataaagaaaaagaaatgatatttttagggatatttatttttatttatttatttaatgaggtttagtaatgatattaaaagggttagttttttgacgttggggagtttatagtatatgtaaattttttataaattgaaatataggttgttatggaataatttatagaaggttgtttttatgagggaaataaagggggtgtgttttagggtattaaagtatatgtaaggggtggttaaggagggttatttttttagaaaaggttatatttgaattaaggataaataagaattagttaggtagatagtgtgaaggagggaaaggggtaatataggaagaaggaattgtattgggtaaagatattttggggttagggagaattttttaaggttggtattttttaagatgtgtatgtggaatgatataggtaagtttggagagtggataaagtgttgtagtattttgtatttaaagttaaggtacgtgggtatagagttgaagttaaggagagtattttagttttgtaataagggttgttaggagtagttattttttgagtaggatttttttgattttagggaggaaagtaagggtaggaggatgaggtggggttatgggtaatttaggaaggaagtgagtagagtatatttacgtggtagcgttgggtatggaatatagtgtgggtttgatagtgatgttaagatagaaagattggattttatggtttattgtgtgggagtaagagagaaaggaggtttgcgtgatttttagtttttgggttgggtaattgggttgttaaagagaatatagaggagaattaagtgagtagttttagagatgataatgagttgggtttgatatttagagtgcgaaatgtttgaggttagttaggtagaatgtttaagtggaagtttgttaattttaaatttgagatttgagttagagagagttttgagtgttatttgtagaggagggggttgaggattgattgttgatgagagtgttttagaagaagagaaagggataaatttagaatggtgggaaatattgtagggatatggagtaaggaagaggagtttaaaaagaaaatattagtaataaagaaaaatagtttaaagaattaggtcgggcgcggtggtttatatttgtaattttagtattttgggaggtcggggcgggtggattacgaggttagtagattaagattattttggttaatatagtgaaatttcgtttttattaaaaatataaaaaattagttgggcgtggtggcgggcgtttgtagttttagttatttaggagtttgaggtaggagaatggtgtgaattcggtaggcggagtttgtagtgagggagatggtgttattgtattttagtttgggtaatagagcgagatttcgttttaaaaaaaaaaaaaaaaggagttagggtttgattgggtatagagaggatattggtggtgagggagatatggaggttataggagagatgggagtaagtttagaagtaagattagtggtagagatagtttggaatttaggttttttaatttttagtttagtatttatttttatattatggtgttttttttttttaggtgaggaattaaggaggggagagggattatggggagttgggattttttagtttgggaggtttggagtaagggtttttttttaaattataattgtatagatggtggaggtattagtagggttcgttgtggatagtcggcggggtttgttgagggttagatggtttagattcgtatagagtaggttttggaggaggaaggggaggaagataagatggtttttatagttttttttggggtttaggtttttttttttttggtttattttttttagagattttggttattttttttttatttttatgtttttatcggtttttggtttaggttttttggaattttgggtttttttttttttattggtttttggggttcggtttttataagtggagttatgtgggggggatagagttgaaggatggagagaaggtgattaacgtgtttgtttttagtaagggtttagatttaggaattgaggggtggggagtgggtatgtaggagaaagaaaatggggtggaattagttttattaaatttagggagtggtcgaatcggttgcgggggtaggcgtttgtaagggatatatgagtttttgagaattattagttttgttttattggtttttttgggattcgttacgttaaggatagtttagtaatttgaaggtttagatcggaaataatttagattttattttatcgatagtttagtttaggttttaattttgttgtatttttagtttatttgttttggtggggttttatttattagttagcggtttcgtttttatttttgattttttttatttttcgttaagttaggattagagttttaggtttagtttttttttttgcgaaggttttggttttgttttttttatttttggttattttttatttaacgaggtcgggttttttttgtttatttgtgtagttattagattaggtttaaagtttttagttcgagtattaatttagcgtttagtagcgggattaggagttggggatatacggattttgggggaaaggcgtggcggggagggatgttgaggttaggggtttgacgagggatagttagtagtttcgtttaagaatttttagttaaggtttttttttttttttcgggtatgtgtcggagttaagtatttttgtgcgtataggtttgtatttattatgggtaggttcgggggttttgtaataggttttgttttttagtacgtgaagtattgtacggttttcgttttcgtggcggtttttgtagaaaaaagtgttcgagtttttcgcgtttaagaggagttttagtcgtcggatattagagtttagggagcgtaggcggtcgacgaaaggttggaggggaggtacggtgggggtttcgttcgaagaggtttataggatcggtcggcgttttttggataggtttttgtaggtcgggaagttgggtgtttagatttagcggatgggatgagagattttttcgtaggagagatttattcggtttttagggcggtcgtttagagaagttaggagaggtcggaggttgtggttagggtacgtttatagggtaagacgattttttatttcgtttttttttttttttttttgttttgtattttagttattttggatttttttatatataatttattttattaggcggtttttattttgttttagtttttttgcgtttattataatttttttagggatcgtttatttttagggtttttttgggttttcgagagtagtagcggtagtagttgtagaaatatagttatggttaggatgtggtgaggagaagttgcgagcgaattagcggcgtggggtcggttggggggggatcggagggaagttaggcgtggggagaacggaggggttggggggtttcgataagagagggggcggggttattagttgtttagatttttttgggaattttcgtaggtaaattcggagtttttaaatggtttttatttaaaatgtgtgttcgggttatttatataaatgttttggtttgtttaattttttaggtgcgtttgtaattttagttatttaggaggttgaggagggaggatcgtttgagtttaggaggtcgaggttgtagtgaattgtgattaggttattgtattttagtttgggcgatagagttagttagattttgttttaaaaataataataataaaaatttttgttttgtaggggattgtgataacgaaataaagtaatatatgtaaattgtttagaatatataggattattatgtaagtgtttgttattattattattatttttattttttttttttttttttttttttgagttagagttttgttttgtggttaggttggagtgtaatttcgatttattgtagttttcggtttttggatttaagtgagttttttgttttagttttttgagtagttggaattataggtgtatgttattatatttaatttttgtatttttagtagagatggggttttattatgttggttaggatggtttcgattttttgattttgtgatttatttatttcggttttttaaagtgttgagattataggtgtgagttattatattcggtttattatttttatttttattttagtttttattttatttttttgtgtttatgttgttttttttggtttggtattttgtttaagttggtaggttttgattggggaggtgttttggagtaggtgtatatagttatatttaggataattgttgttgttggattggagtaataaggttatattaagcgtaagtggagtacgggtgatattttgagaatttttatgggagtttgaggtagttttatttagtagatttgtggtggtttttttggatgagtagttttagtttttgtttttgttgttgtggtattatagaagttattagtgagttatttattgttgagtaggtattggaaagatcgagtgggggttgaatggagattaatttgatttattttttttttaatttttattagtatgtttttattaatgtttagtagggatttagggatttaaatttagtaattaatttgggttatatttttttgtttattttttaggaattagtagaagttgttattatggatattgtaaattatagaggtttttgatgatgtttatttagaggattgagtagtaggatttttagttggggattaggaagggtattttggtttgaaattaagaattataatggtattggttattagtggtatttgtttttttttattttttttttttatttttattttttatttagttttgtttagtgtttttttattttttgttttttttttggttagttgcgtagtaagtgagaagggaggggttattagaggtagggaagggaggagtttttgggtttataaattttaaaaaggttatttaatttttagagttggatttttgaaaatttattttattagttgttgtggttgttattatttttaggattttcgttatgaaagtttttatgttgtttattttgtttgttttgttttgttgggttttaggtgagtatttgggggttttaaagatttggtttgtttggttaggatttttatattttgttttatttatttttcggttttatttattattcgggattttaatatttttagttttaattggtttagtttttttgtgttattaagattaggtttttttatgatagtttttttgttttattttttaaaaagttaggtttttatttattttttttatttttaagaaagatttattttttttatttgttagggttttgggttttttgttttttattttaaggtgttttttttttggaaattttggtatttagttttttaattagttttattttaatatgtaattttttagagtttagtttatttgtttttttttttatttgttgtgtttagtaaggtgttttttcgaagatttaggtatttagttttaggttttttttgtaatttattttttttatttattttattagggatttatatgtttagttttttagttatggttttttttagatattttttattttttttttgggttgtatatttttttttatataggggatataaattttttagatggttgtagtgatatttaagagtttttatggaaatagagcgtttttttgagttttttgaagaggggataattgggttatttatttttagggtgaagtggattttattgaggtatatttattaggtttttttattttcggattttgcgttattaaattttgtttgtttaaattttgaattaattgaagtaggaaatttggggtgttattttttgtatttattttttttattttgataaggtgttaagatggaatttggtgatttgttttttaggtattatttttttttgttgaagagttattggggtgagaggattttatttaggtttggttttttttgttatatttttgttagttttaggaggtgaagagtaaattgtaaattgttaaagttggttatagatggttttttcgttagttttaagttttaaggtatttttgatagtgttgtaatttttatgatttttatttttattattttttttttttttaagtttttatttttttttttattatttatattttttttttatggtattttttttatattttatttatttttagttttatgtttttttttatagttttgttttttttgatttatttttaaacggggtggagtgacggaagatatgtagggtatgggttttttataaagtaatagttttatttttatttgtcgtttattttttattttttttgtattatttatttgttttgtgtttgttagattaaatagttaaataggttggagtatttacgggatgggtttttttttattttttatttttgtttttagtttagtttatttttaggtaagttagagattttattattttagtttgatttgtgtttttttagttgatattcgttgttatttttgttataaggtttttgtgttgggttgtgtggatcggtagttttgtcgtttggagttaggatagtaatgtttgataatatatgtatattttggtaatatttttttttttagtggggtgaatagggaggtgggagtttttatgattaggattgaggtttaaatgggtttaagattgagatggagaagtagaggattatagtaatgataatatttggttaaagatggttgtgtgttaggtaatattttatgtttttgtatgttttttttttaattaatgtttatgataattttgtgatgtgggtgttattattatattgagaaaacggttttaaaaagagatagtaatatagtcgggtatggtggtttatgtttgtaattttagtattttgggaggttaaggtggttggattatttgaggttaggagtttaagattagtttggttaatatggtgaaattttatttttattaaatatataaaaattagttaggtatggtagtgggcgtttgtaattttagttattcgggaggttgaggtaggagaatcgtttgaatttgggaggcggaggttgtagtgagttgagatggtattattgtattttagtttgggcgagagtgagattttgttttggaaaaaataaaaaaataaaaaatagagatagtaataggtttatggttagtaagtgatagaattaggattgggggagtggtgggtaaggatgtgtagaaggaagattagattaagaaaagagaaggggagggttagggatagagttgggaaggaaggaagtttaggtgggtggatggggtggggaggtggatataggtatgttaggtgtttattttggtcgattttttgtttatttttatttttaggtaagatgtgggttttttttaatttgcgttgtggtatattagaagagttttgttaggaggtttttaattaaattaatcgtaagttgggtttgatatataatattatttgttgtaataaggataattgtaatagcgtaggatttcggtttattttagttttgggttttgttttttttatttttttggttggttttggtttttggttgttgtattgagatttattttattggttgtttttttttttatttgttttggtttgagtttttttttttgtgtttttgtattttttggttttatagaatcgtttttttttagtttttatttttttaattaaatattgtttcgagtggtttttttatttattttttttattttatattttttatttttttttttttgggtttttttttatttttttttaggatttttattggtttttagaagggttttttattttgttttttatattttgttgttttttatttgaggagggattgggatttgggtttgaaatggggtttttgtgttgtttttagtgaaggtttttataaggatttgatgattttattgtatagagttgattttttaaatttaggtttttatatgtattttattttttatatttatttttttttattttgagtaataaatgtttgagtttgataaaatgtatatttattataagaagatttaagggttaggttattttttaggaaataatatttttaattttttttttttatataggaattttttagggaggttttttgggaggttgggttggggaaaatggagaaataggttttttaggtttttatttttttttttagtgtttttaggtggtatataataatttatattttaaatttaggttatatttttgatgtattgttaagaagaaggtgcggtttggtttgagggttttttagaaaggataggagaggtatatggagatggggtttgagattttgtttttttagttttttttaggttagagttaaaggttttatttagtttagttagtaagtagggtattaagtagtttttatttattatagtttttatatttttttttttaatttaaaatagttttattgggagttaatttgtaaatgggaaataggggagtaaatttagatttatgtttataaaattttggtaattttatttaatgaattttattgttaaggaagatttaatttagtaataggatttaggagttatagaaggtagataagttattgttttttggggtttagttggttaaggagtgtattattgtaattaagttcgttgttgtttggtaatttttaaattagaatttggatgttttatattacgtttttagtttttttattaattaaagatagatgtaattttttagttagttgtagagtggtttatagattttaatgatttatagaaggatgtttgtttttttatattagatgtttagatgttttttgtttttttgtttttttgtttttttttttatttttattttttttattcgttttatagttttggtaagagataggttagggcggtagttgttgtagttaaaatgtttgtaggggttatatggtttgttacggcgttgttgtataggttttttaggtagtagtttttgtgggttggataagttacgttttttatcgattttgtttttatttgattgtaatgatgggttgcgacgtaggttggatgttggtgaattaaggttattggggttgagagagagaatgaaattggggtgttggatttttggttttaggatttgttttttggggtagagtagatgtgattttaaggagtttaaagggatttttagtttttttaaaaaatatttttttgaaattaagtgattaaagttaatgtattgattttgtaaatttttgatgtgatgtagtaagaaggatgtaatattatttttgtagtatttttgtttaaaatgtatgattttaattttattatggtaaatattagataaataaatatcgagggatattttataaaataatttttagtattttaagtatttgtaattttttttttttttttgagacggagttttatttttattgtttagttggagtgtaatggtgtgatttcggtttatcgcgatttttattttttgggtttaagtaatttttttgttttaggttttcgagtagttggtattataggcgggtattattatattcggttaattttgtatttttagtagagacgagatttttttatattgattaggttggttttgaattttcgattttaggttatttattcgttttggttttttaaagtgttgggattataggcgtgagttattgtattcggtacgtaatttttgtttaatttaaaaatgattttatttaattttagagaaaagattttgtttttttatttaggttggagtgtggtggtgtaattatatttttttatagttttaaatttttgggtttaagtaatttttttgttttagttttttaggaaattgagattataggtgtgtgttattatgtttggttaattttttaaaaatattttttgtagagatgggggttttattttgttgtttaggttggtgttaaatttttgattttaggtgattttttagttttggttttttaaagtgttgggattataagtgtgtgttattaagtttagtttaaaaattattattattattatttttgagatagggttttattttgttttttaggttggagtgtagtggcgtgattatggtttattgtagttttaattttttaggtttaagcgattttttttttttagttttttgagtagttaggattataagtatgtgttattatatttaattaattttttaatttgtttgtttgtttgtttgtttgttttttgtagagatagggtttttttatgttgtttaggttggttttaatttttgggtttaagtggtttttttattttggttttttaaagtgttgggattataggtgcgagtgattgtattggttttaaaagtaattttttaaattttaggtataaaataatttattagggttttttaaatgtgttagggttatgaaagataaagaaaaatagaattggtatagattagaggagattaagaagatatgagagttaaatgtaatgtaggattttgttaaattaaataaagtttgtagattagttagtagtattgtattagttattttgtgattttgataattgtgttatggttatgtaagatgttagtattaggagaagttgagtatttttgtaatttttttgttaatttaaaattatgttaaaataaaatattaaaaatatgtatatatatatatatatatatatatatatatatatatttttttttggtttttaattaatgtcgaaaatttgaagtttggttttaattttggttttttagggttagagttttttatttgtgagttaatgggtttatgagatttttttaggagaataaggaggtggggaagtgggggtataaggattgtgggttttttaggggtttcgtgttaggagttagaaggggtatagattgtttttttttaatagttgtattatttgtttagagttagattgagtttggagggttttggaagttagaaggattgatatggggttggaggtagggaaaggttgttggaagagggagaaattgaggatttacggtttttaggtagtttgatttgttttaggtttggttggggtttgttttcgttataggtggttacggtttttttgtaagaattgttggggtttttattatagttgtagtatcgtattcggttttttggtaggagaaaagaggcgttggatttgggttttcggtggagtcggttggtagaaggtttgtgtgagaagttagttggtcgtttttttatttaaggtagtttttagtagggagttgagtaagattttaataaattggggttttatcgtagtttgttcgtgttaggatcgtttttattttttgtttatttttttttttagttcggttttgtttgttttatatttttcgtgttttgagttttatagggttataaaaaaggaagaaagagttttttttagtaggtattaagggttttagtggggatagggaggggttttatagtatgtttttagtattttttggagtttttaaatttttttatttttagtagtagtttgtggattaataagaatttttgaggatttttgatatttttttatagggtttttgagggttttttttttgtaattatttgtgtaaggttagattttttttatatattggattttaacgaaaataatatattttaatagattgaatgtagaagtagataggaaaatttaggtattttttacgaagtttgatattagatttataaaaatgtaaagtaatgtttagttttttattgtgttgtggagaaataatagttattttttataaaattgtattttgttagtatgtaatattttattatttttattgtttaaataaattaataaatatttattttaaattttttgttttaatttttaatgtagtaaatattgatataattttataaagaaaagttttttagagttttaagtaattttgaaaagtgtaaagaggttttgagattaatatttttgaaaagagttgtttttttgggtatttgtgttttttttatttttattttttgtttttagttttattttttttggtatatgttggttttgattttttagatgggttttttttttttttagtttttttaattttagttttttaggttgtattattatttttttattttaaattttatttatgtttttttttttagtgatttttttttagtgtaagtatattagtaggttttttagttttattcgtggttattttttttttttaaggtagtaaagttggtagggataattatagggtaggaatgttgaagtttggggggattaaagggatttgaagttgggtggggttcgtttttatatagttgggttttgtgtgtgtatgtgggtgtgtgggtgggggtattgttgattttatatttaaatagatttacgtcggggttgtttaggagggtgattttgagagatatgaaagtattgagggggaaagatagagaaaataaagatagagagaagttgagagagttagggagtagtttgagatatggggagggagggggaggagtaggagggaaggcgatagatataatttaggagtaggagaggaagttaagttatagagataatatgttgagagagtagaggagattttttaggtaagggtagattttttgtaggggtaggttgggggttttcgttgtttgttgggttaggttggtgaatttggttatggtttcgttttttagatttattttttaggtgtgtttgtttattggttttttattgttttgtttaaatgttttaattttataaatttcgggatttcggggtgtagattattttttttagatttttgagtttgtgtttggttatgggtatttttagtatttttttttgcgtgttgtttttttgtggggtattgggtaagggtgggttggggaatttttagtggttagggggttgggggtggggataagggtatgtggaggaatttgagggttggggaggagaggggtgtgggtgttggaagaggttaagaagagagttgggggagtgggggattttagggagattagttattgggaaggttagtttgatgaggtgggaaaggaagagtttttttttaaggtatttgagaataattgttttttttttgttgtatttttgattcgtttttgttttttttattttttattttacgtgttgtttttgtgttgggttttttggttaatgttaatttttatttttttatttgtttttggtgttatttatttaatttttttattgatttttttaatttttttgttgttgggtttggttttttgttttattttttttatgttggtttttgatttttgtggtttttgtttatgtttgcgtattttttaatttttgtattttttttgtttttatttttgtttttttttttgtatcgtttttttttttttttttgagatagagtttcgttttgttatttaggttggagtgtagtggtatgatttcggtttattgtaattttagttatttagatttaagagatttttttgttttagttttttaagtagttgggattagaggtatgtgttattatgttcggttaattttttgtatttttagtagagacggggttttattgtgttagttaggatggttttaattttttgattttatgattagttcgtttcggttttttaacgtgttgggattataggcgtgagttattgcgtttagttattttttttatttttgttagttttttttttttattttatagtttttttttttttgttttatgtgttatttttttttgtgattttttttcggatttggtttttgtttgttttatagggagggtttgttttttttgtttttttaatttttgttgttttaataggttttattatgttttttgttcggggaaggtttcgttgttatatttgtggttttattaaattttgttattttgtttttatcgagtgtcgggacgatgaagtttgtggtattagtattggtattttaggtaggattttggtttaatggtttttttttaggaggttttttatttttatttattcggttttttttgtggttttcgttttagtatgttttttttattttatagattagagtgagattattgagtgaaaaagttgttttttaagggtttagtgttttttgttaggttatgttatttattggttgtatttttatattttgtggtattattgttgcgagtaggatttgtgtaatatagtcgtttttttatagtagtttattagttttttcgtttttttgtttttttttgtggttagtttcgttgggagaggatattttttttattagttttcgtggatttgtagtttttaatttaggatatttttcgttattattgcggttttggaaatatttgtatagatattttgagatatgttcgagaatttaattttgtatagagattttagattttttagtagattttttatagattttttataaggtttggggaggtatttgtttagagtttaattttataaagaatatttattttgcgttttttgttttttttagatgtttattgttgatgtttcgtgttagtttaggttattggtaaggtaggtattttgatgatattgtggattttaggtaaggggattaaaggagtattaggtatggtaaggaggagagttttgttaggaaagattaatgtggtaggtcgggaatttaggatggagggtttgggggattatgaagagtatttttaataaaaggtttatttaggagtttagtaatattgtagatattgtagtgtgtgtgtgtgtgtgtgtgtgtgtgtgtgtgtgtgtgtttgtgtgtgtgtgttttaagagtaaattgtagttgtttggtgggttgggttggagttggaatttggattacggtattttttttattttttatttgtgttattttcgtttttttttttgttaatggtttagtttaagtttttgtagtttgaaggttttaggtgagatttttgagaaagtttttttttagtaaggtttaagtttgagtagagatataaaagggtatttagtggagttgtttgtgagggtgtggttggagtttagtttatttttgtttgagattagggaatggttaagttgggagtattaatattttttttcgttttattagtttagattcgtttatggtttatagatattttagtatggtttcggtttaataaataatatatttttattgggtttgttagtttgagtagatattttttttgttttcgagaaatagggtgtgattttagggtagtaggaaggaagtgttagagtggcgatagttgtttatatgttttgaatgtttcggtaaggcgttatagggaagagtgtgtgtttaggataaggaaggataaggagggggtttcgggtgggagttgagtataggtatttttattttgatttagttttttttttttgtatgtgaggaagtttggggttgattaaatatgtttgtttttttttttttttgtgaggatgagatatggggtagtgggggtttggtttaatttagagatgggttgaggttttttattttttttgtttttttatttttttattttgtgtttttatttttttttttttgtttatttttttttattttttttgatttgagttttttttttttttttttttttttcgttttttttatttgttttttagttttattgtaatggattttttattattgtttaagtttttagatttttgttttttttttgtgtatatttattttttttgtttttattagtaattttaggttttttttaattttatagtattatgggtttagggttatttttttattgttgttataagataggagattaaatttttttgtaggttatattatagaataatgtttttttttttttttagttttttatttttttttatatatagtttggtggttgttggaggttagttggatggtgaagtcgaatttttagtttcgttttttttgttaaggttgtcgaggaattttttaggtgttagatggttagcgagatagtaggttatattttttagtagatgttattaaaattatttgggtttgtgggtaggtgggttgtggggttttttagagagatagattaaggatatttttattttttatatttttaggaacgagggtttatttttaatttaattcgtgttttttttttatttttagttttttttaggatttaagtttttgttttttagttgttttttatttaagacgggttaaatggatgtttttatagatttggatttcgggtttgaattgaggaatcgaggtatttggggagaaggagttattagggatatagaagagaagttagtagataatttagagtcgtgtttttcgtttttttttttagaggaggtggggtatagaggtagggtgtgagtttagttttttgttttttatttatgtgttttttttttttttcggggagggagggatttatttttgtttggagttttacggattttttgtttttagagtacgatgttgagggttaggatgataattttttggtttattgtgagtagtagtattagaatttaaggtatgttttagttcgtggaaggggtatagagggtaggagaagtatcgatggaggttgtagtaagggttagattagagggatgggagggaggtagtgaggggttttgtttttgtgttttaaagagaggttttttttttatagtttggtgggtttttttaatagaagattttgtaagtttttttgtttataatattttttattttattttgtttttttttaggttttttattttgatttatagagaatggcggttaggtatagtggtttatgtttgtaattttagtatattaggaggttaaggcgagtagattatttgaggttaggagtttaagattagtttggttaatatgatgaaattttatttttattgaaagtataaaaattgaggttaggcgtagtggtttatatttgtaattttagtattttgggaggtcgaggtgggtggattatttgaggttaggaggtcgagattagtttgattaatatggtgaaattttatttttattaaaaatataaaaaagaggtcgggcgttgtggtttatatttgtaattttagtattttgggagattaaggcgggtagattacgaggttaggagattgagattattttggttaatatggtgaaatttcggttttattaaaaatataaaaattagttggacgtggtggtatatgtttgtaattttagttattcgagaggttgaggtaggagaattatttgaattagggagttagaggttgtagtgagtcgggattgcgttattgtattttagtttggcgatagagagagattttgttttaaaaaaaaaataaaaaaatatatatatatatatataaaagttagttaggcgtggtggtaggtatttgtagtttagttatttaggaggttgagatgggagaatagtttgaatttaagaggtagaggttgtagtgagttaagatcgtgttattgtattttagtttggttaatagaataagtttttattttaaaaaaaaaaaaaaaaaaaaaaaaaaaggttaggcgtggtggtttatatttataattttaatattttgggagattgaggtaggtagattatgaggttaagagattaaggttattttggttaatatggtgaaatttcgtttttattaaaaatataattttttttttgagatagagtttcgtttttgttgtttaggttggagtgtaatggcgtgattttggtttattgcgttttttattttttaggtttaagtgatttttttgttttagtttttcgagtagttggggttagaggtatgtgttattatattcggttaattttgtatttttagtagagatagaatttttttatgttagttaggttggttttgaatttttaattttaagtgattcgtttgtttcggttttttaaagtgttgggattataggattgagttattatgtttggtttaataataataaaataaaataaaataaaataaaaagtagagaatggtaatgttttttgtttacgtatgggtaattaattatagagtagattattagttataattatattttttttttatattttttatagtaatttatttttttttttaagaaaaaatagttagatgtgatggtttatgtttgtaattttagtattttgggagattaagataggaggattatttgaggttagtagtttgagattagattgggtaatatagtaagattttgtttttataaaaaatttaaaggtgcggtggtttatgtttataattttagtattttgggagattgaggtaggtagattattagaagttaggaggttgatattagtttggttaaaatggtgaaatttcgtttttattaaaagtataaaaaattatttaggtatggtggcgggcgtttgtaattttagttatttgggaggttgaagtgaaagaatattttttttcgtttttttttttagtttatttgttaggttaaagttgatttttttgttgtgagttatgaggtagcggatgatttttggttttcggtttttgggtttagaaagtttttttttaggatatattaagagtagggtagttttattgttttagaaggattgaatacggttttttacgggatttttttttttttgttaggttatagagtttatgcgtttgttggggattatagagtataggaggatattgtagggggatttatttgtagtttttgtagataattgggattttgtaggggagagagggattttttagttttttatttggattttttgggttatagtagtttttggtttgtatgtttttatttatttttgagtattaagacgtcgtatattttttagttttggtagttgtggtgttgatttagtatagcgtattagtatcgttcggtatttttttttttggatttttttaattataaagaatagttttttagtagtttgagtttggattttttttttggttttttagggtttggggttggtttgtttatttggatttgggttattagggtggtgaaggagtttgttgtagggttgtagaattatgataggtgttcgtttttatgtagagtagatggtgagggatatggtagttttattgttttttttaaggttatatagatggtttgtatgttgtttgtgggaagagggttgtatgaggttagagatttttattagattaataattttttatttgatttttaattttggttttttttttttttggggttttttagtataggtttggttggtgattatattttttaagtgatagttataaaaataagataggtggagagaagagggtaagggtttttttttttttttttttagttagtgagggggtttgagggtaagagggaaaaggttgaaagttggtaaatgtttatattttttttatttatttttatttttttggaagtatttatttattttttttattttataaaggaaattgtataatttggattttcgttgtttttgggttttttttagtgttagaggtaggaggaggttggttggggtaattttatttttttgagttagatgttttcgttaggtttttaggagaaagagtagtagtttttttttaattttgtaaatagttaaggaatttcgtattttttgttttttatttgtagtttggggagttttatataggaataggaggaggaataagattgttatggggagagtttgttaagtttttttgttttaagatttggtgtttttagggaggaagtagagtttagataaaggtttatattcgttggtttggagtgataaggggttttggaggggatgggaatgttggggcgataaagtttagtagtatgtttattagggataaagtgattattatttttttattttggagagaaaaggatttagtttaggttattttgaagatgatttttttgtttttttgattttatattagttaaggggtttaaataaagattttttatgtaaaaaattatgtagagaagtggttttgtttgtttagtttttgttagtttggaagtatattttgaggttttttttatttttaagaaaggttagttatgagttgggtggattatttgaggttaggagttcgagattagcgtggttaatatggcgaaattttgtttttataaaaaatataaaaattagttaggcgtggtgatatgtgtttgtaattttagttatttaggaagttgagaggtattagaatcgtttgaattcgggaggtggaggttgtagtgagtcgagatcgtgttattgtattttagtttgggagatagagcgagattttattttaaaaaaaaaaaaaaaaaaaaaaaagaaaaagaaaagaaaagaaaagaaatgttagttatgagtgaagaaattgagtttgagtttttatgttggttttttatagaatttagtataagattgtgtatcgagttagtgtttcgtaaatgatttggaatgattttttttgtggttgtttggtatatttcggattttttttgaaattttaataagtgtattaaattattatttagggataaggttaacgggttgatttatttttttgaacggtaaaaatttttaaggtagatttttatgtagttattatagttttaatgtgtaatttatttatttttaaaattattttgatgaaatattttatatatattaaaaattatatgaagtataattatataatggataaatgtttaatagagtagaagattggatagtaatgagaatgaataaatttagtgatttgtaataaagttgaattttataatataatgagagtaaaagaagtttggttaggtatggtggtttatgtttataattttaatatttttggaggttaaggtgggagggttgattgaagttagaagtttgaggttgggtaatagagtaagattttaattttgaaaataaaggttagacgtcgtggtttacgtttgtaattttagtattttgggaggttgaggtaggcggattacgaggttaagagatcgagattattttggttaatatggtgaaattttgtttttattaaaaatataaaaattagttgagtgtggtggtggatgtttgtagttttagttatttaggaggttgaggtaggagaatcgtttgaatttaggaggtagaggttgcggtgagtagagattatgttattatattttagtttggtgatagagcgagatttcgttttaaaaaaataaataaataataaataaataaataaataaatagaatattttaggtcggattcggttgtttatgtttgtaattttattattttgggaggatgagataggcggattatttgaggttaggagtttaagattagtttgattaatatggagaaattttatttttattaaaaataaaaaaattagtagggtatggtggtatatgtttgtaattttagttatttgggaggttgaggtaggagaatcgtttgaattttagaggtagaggttgtggtgagtcgagatcgggttattgtattttagtttgggtaataagagcgaaattcggtttcgaaaaaaaaaaaagaaaaagaaatagaatattttaggttaggtatagtggtttatgtttgtaattttagtattttgtgaggttaaagtaggaggtttatttgagtttaggagttcgagattagtttgggtaatatggtgagattttgtaaaattagtcgagtatggtggtgtgggtttatagttttagttatttaggaggttgaggtagaaagatggttgagtttagtaggtggaggattagggtagtgagtcgtgattgtgttattgtgttttagtttgggtgaaagagttagattttgttttaaaaaaaaaaaaaaaaaaaaaatagaaaaaaagaatatttcgttttagttagagattttttatgttgtgtaattataattttgaatttttttttttttttttatttgttttattattaaattttatgtgtttttgaatttaatatattagtattacgtatatatttttttgtggttttttatttttatttagtattatggttttaagatttagtttatgtataatagtaatgatttatttattttttttttataaatatttcgtatattttattgtgttgaattttcgtatttaggattatggtgtagttttttatttattgaaaagtttttcgtttatttttttttttttttatttttttaattattattgttattattttgaggtagggtttggttttgttatttaggttggagtgtatggagcgattttaaattttcgggtttaagcgatttttttattttggttttttaagtagttgggattataggtgggtattattatattttgttaggtttttttttttttttttttggtattttgtgtagagatggggttttattatgttgtttgggttggtttggaattttagggcgtaagtaatttttttttagttattttaagtgttggaattataggtatgagttatggtttggaatttttggacgtaagtaattatttttcggttatttaaagtgttggaattataggcgtgagttatcgcgttgggttagtttatttttatttatttatttagagatagagttttgttttgttattaaggttgaagtgtagtgggaagatttcggtttattgtaatttttgtttttcgcgtttaagcgattttcgcgtttcggtttttcgagtagttgggattataggcgcgtattatttatgttaggttaatttttgtatttttagtagagatggggttttattatgttggttaggttggtttcgaatttttggttttaagtgattttttcgtttcggttttttaaagtgttaggattataggcgtgagttattgcgtcgggtcgggttagtttgtttttttaataattttttatagttttttttataaaattttgtattttttgtattagatatatttttagatattttatgttttcggttatttttattaagtatttttaattttatttttcgttttcgttgtcgttttagagtttgttaataatgagatagaaaaaaattattgaattatgttcggtaattttttgatttttcgcgttttagtggttttttattagtttcggattattgttgtattcgtagttttaattgcgcgaaattttttttaggaagtattgaaaatgtcgtaattcgttcggaggcggagtcggtacgggttgacgttaagggtatataatattttagaggtagggagggcggggtcggtagggggatttgttgttggaagagtagcggttcgagtcggggttatggcgaagttgttgagttgcgttttaggttttcggttttataaaatttatcgggagagggattttgaaagggtttcggttagcgtttttgagacgttaacggtagttattgttttttattttagtttttgggtgagtcgagtttttttttatcgaagaacgtggtatagtttaaattttttacggttttttgttttttagaagtgtttataatgggaaataaggggagtttgtttgttaagttagttattcgtaaaatttgcgttttgtgtgttttttgagttaaagttacgtttacggattggtcgttttttttttttttcgttttttatcgtttttttatttcgattgttattttttgttttttttttttcgcgttttttcgattttgtgtgtcgtggttcgtgtcggttttagttgagttttgagtttcgggaagagattttgcgcggattggggagtcgttgaattttgttgttagatttttagtttttttttttttagtgtttttttatgtttttttcggttttgtttttattttttttttattttcgttttgaattttagaatgatttttatagattttgtattcgtcggttttttttttaattttcgtttaatttagtttggagattcgagttattgtattttggagagttggcgggtggtggtaggttgttttaaatattttttttttttttattagttgttttattgtgttattgttttttataaattgttcgtttttatttatattttttttttagttaattatttttatttttgatgttttttttttttttttagattgtttaggtgttttttttttttttttaaattaatttttttttttatatgtacgcgtttgtaatttatttgaaattaggttgtggaaaaggagtaaaaatcgtttaatgttgtttttatttttgtttttaaatttagttttttgtgtttgtttttatggttaggggtgggaaattaggtttagagtgagggtgaggaagaggagtttttgtgggggttagggatgttttaagagagatagttaacgagattagaattagaggatatatagtagggtttttgaaagggaagggaaaggatttgttagtgggtagggtttttaaggaggttatttgttttggtaggatacgtattattagtttcgtgttttggagaaatatgttgatagtattttggtattggtatgtttattttggtatttgggattttgtattttttagatttatttgtttttttgaatttagttttttttaatttgggagtaatagtgttttggggttgggggatgttttgggttttgtagtagatttttttaatatagatatataggtatattttaaatgtgtatatttggtatttttttttggtatgtagtattgttttttttgggggtaatttgagtcgtaaggaaaatatgtttatttttgggattatttgtaggtgttaagttttgtagttttttagtgatttgttttttttggtaattaatttttttggttgtagggatagttgttttttttggtatagtttttgtggtgacgtttgcgtattttttggggattaggttaggggttgttttgagtagggttaattgaaaaggtttgattaatttgagtagatagagagattgtttttaaatgtgatggaattatgtttggagatggaagatataatttttttataattttagaggaagaaaatagagtttgtattaaatttttttagtttttattatattgatatattattttttaataaatattgagtatttattgtatttatggtgttatatattaaatatgatatgatattttttaggttgtttattttgtttagagtgtatagtatatgtttggaatggtaggtgtgtgtgtgtgtgtattgattgtttgtttttgtttttttgttgtaggttttagtattttggtttattttttattattttttttttttcgtttttttttatttgtataggaaaggttagtgtggttttaaaggtggtggggtagtaaatgggtaggttgttggtagatgagttagttttttaaagaggagaggggatttgtgaagatggtttggttttttttttttattaggtatttttttttttttagggtatggttgttttaaatagggagtgtggggtggaggttggggttgaattgggaagaggagttgagggatattgcggagagggttttatattgtttttttttttttttaggttatttgagtttgtttaaagtggtgtcgtttttttattatgttgggatattgttgttatttttggtaggtgtggtttgttttcgaggtaggtggagaggaaatttggtttgaattttatttgttattgttattggttaaaaattaagtattttgtgtaaatatattttagtgatgggttttcgagagggaattattgagaatggtttaaggtatgattttttttttaaaagatttgggttataaatatgaaaaaataattgaaaagtaataaaaaggtttgtttttttttttttaagagatagggttttattatgttgtttaggttggttttaaatttttgaatttaaagtgatttttttattttagtttttcgaagtattgggattatagatgtgagttattatgtttggttgtttttatttagaaaagatgtatatattttataataattttatatatgtatatatattaggaaaatttttgtatatgtataaataatatagatgtataagaatatagtatataatattgtttgtaataattttaagttggaaataattttagtggttataaatagtaggatggataaaatatgttttgtgtggtcgggtgtggtggtttatgtttgtaattttagtattttgggaggtagaggttagtggattacgaggttaggaatttgagattagtttgattaatatggtaaaatttcgtttttattaaaaatataaaaattagttgggtatggtggtacgtgtttgtaattttagttatttaggaggttgaggtaggagaatagtttgaatttgggaggtaaaggttgtagtgagacgagattgcgttattgtattttattttgggtaatagagtaagatttcgttttaaaaaaaaaaaaaagttttatgtaatagttatgtaagagaatattatatagtaatgtaaatgaataaattgtagttacgtttaataacgtagatgaagttaggtgtagtggtttatgtttgtaattttagtagtttggtaggttgaagtaggtagattattagaggttaggagtttaagattagtttgtttaatatggtgaaatttcgtttttattaaatatataaaaaaaaattagttaggtatggtggtgagtatttgtaattttagttattcgggaggttgaggtagtagaattgtttgaatttaagaggtagaggttgtagtgagttaagattgcgttattgtattgtattttgggtaatagagtaaggttttattttagaaaaaataaaatataaaaaattaattgggtatggtggtatatgtttatagttttaattgtttgggaggttaaggtatgagaattgtttgaatttgggaggtagaggttgtagtgagttaagatagtattattgtattttagtttgggtgatagagcgagattttgtttttagataaataaaagtaatgtagatgaattttttaaatgttgtgttaaatagaagaagttaattataaaataatgtatgtagtatgtttttatttatataaaatttaaaagggatgtgtatgtttgaggtagaatatcgaagataataagggtatggttttttttttttttttttttttttttgagacggagtttcgttttgttttttaggttggagtgtagtggcgcgatttcggtttattgtaagtttcgtttttcgggtttacgttatttttttgttttagtttttcgagtagttgggattataggcgtttattattatattcggttaggtttttttttattttttagtagagatggggttttatcgtgttagttaggatggttttaattttttgatttcgtgatttattcgtttcggttttttaaagtgttgagattataggtttgagttatcgcgtttagtaagggtatggtttttttaaaagttaggagagtgattatttggggtgggggagaatagagtgggggagagttttgttgagaggtggttgtgttttttttgttgatttaggtgatagttatatgaatgtttgttttgtattttttaaattgaatatatgttttatgtatatatgttgtatttcgtaatttaaaaaaataaagaggatagattatttatttttagtgggtatataagatgataattaggtgatgggcgatgttttaatatgggggtggtggggttagggttggatggtcgtagttgggtttaggattttttgtttgaggtgttttgttttttgatttttgtaggattgggttttttttttagagaggttttttttgattattttgtttaaaagtagtttttattgtttagttttgttttagttttttattttatttatttttaatttagaaaaaatatagaaaaaattagttgtgtatggtggcgggcgtttgtaattttagttatttgggaggttgtggtaggagaattatttgaattcgggaggcggaggttgtagtgagtcgagagtatattattgtattttcgtttgggtaataagagtaaaattttgttttaaaaaaaagaaaaaagaaaaaatatagaaaagtttagagaataaaatataaaagtttttttaaattttttgatgtatagttttgtgatttttttttttatatatagttttgtgatatttgttttaaatgttttttgttaataaaatattaaagtattatagttagggttggagtttttattggaatttttttagttttatttttttttttttttagaagtaataattgttatttggtgtgggttttttttttttttggtatatatttttatgaaatatatattttagttttttaagtttaagttgttattaattgtaaaatgaattttaattttagagtttttaagggttaaaaaatatatattttagaatttatgaaatatggtatttataagtagtatgtattattttgtatattttatatttttggtataaatgttgtataaattattttgtagtatatattatttttttattatatcgttttgggggaatattattgatgatatataaagttttggtttatttttgttgtattttttttgtagtatttatttttttttgaaatgttgtttattgtttttttttggttgtatttaattttaattagaatgttagttttttgagagttaggagttgtgtattttattttttgttgagtttttcgtgtgtagtacggtgtttgtttgatatacgatatttgttaagttagtgaggagagaagttagggtttgaggtggtttagtagtgaaaggagagtggatgtaattattgattgtgtaagtgaaaagagagaggagagagagttagtattgagagttgtttttgttttagaaaggaaagtagaaaggaggtaggagaggaattgtttaggaattggaaggagttaaggatgggtttaggaagtagaggtaggaagaattttgagggatagggagaatgttgagtagtatagttgaagagaatgaggatagaagagttaggaatttagtgaggaagtaattatgggtaggagtcggagattttgaagttagatggtaaggggttagaatatatagaaaagaggtagaaagtaaatattggagaagagtggtagtgaaaaatagagaaatttgatattcgtaagggagaatagtattatatgatagtgtttaatagtgttatttaataggttatatgatagtgtttaaagattgaggaagaggaatattttggaagatggtaggttaaggattgtttataaagatataaattgtagaagttagggagaagaagcgttttgtagttagttgttggatttggaggaagggggttggtttatatttattttttcgtattttatgtttttagttttttttttttttatttttttttatagggtttttttttagtttatttttaattttttttttaaaatttaggttttttgttttttagtttttttagtattgttttttgttttttttttattaggtattggtcgttggattaatttttagtatcggtagtttattattattttggaagtaatatatcggaattagtttttagaaaataaggtgagaggttttaggaaaagtgttatataggtatttaatagtagtttttttagttgttttttagagtattagatattggtttttgtaggaagaggaggtgtgttttattatttattatattgggtgtttgtttgtatattgttgtatttttttttatttttattagtgaattgtttatttgaggaattttttttttttattatttttaatggaatattttgttagaataatttttttttttttttatttgtaagaattggttaaattagaaatattttataatgttttttttttttttttttttttttttttttgagatggagtttcgtttttgttgtttaggttggagtgtaatggtacgatttcggtttattgtattttttattttttaggtttaagtgatttttttgttttagttttttgagtagttaggattataggtacgtattatttatattttttaatttttgtattttttgtggagacggggttttattatgttggttaggttggtttttaatttatgattttaggcgatttgtttgttttagttttttaaagtgttgggattataggcgtgagttattatttttggttttttttttttttttttttttttgagatagagttttatttttatttaggttggagtatagtggtataattttagtttattataatttttaattttcgggtttaaataatgtttatgttttagttttttgagtagttggaattataggtgtatattattacgtttagttaattttttttttttttttttgagacggagttttattttgtcgtttaggttggagtgtagtggcgttattttagtttattgtaagttcggtttttcgggtttatgttattgttttgttttagttttttgagtagttgggattataggcgtttgttattacgttcggttaatttttttatttttagtagagacggggttttattatgttagttaggatggttttgattttttgattttgtgattcgtttgtttcggttttttaaagtgttgggattataggcgtgagttatcgtgtttggttaatttttgtatttttagtagagatagggttttattatgttggttaggttagttttgaatttttgattgtagacgatttgtttgttttggttttttaaagtgttgggattataggtgtgagttattgtgtttggtttatagtgttttttttttttttttttgagatggagtttcgtttttgttgtttaggttggcgtgtaatggtatgattttagtttattgtaattttcgttttttgggtttaagcgatttttttgttttagttttttaagtagttgggattataggtatgcgttattacgtttagttaatattgtatttttagtagagatggggtttagttgtgttggttaggttggttttaaatttttgattttaggtgatttatttgttttggttttttaaagtgttgggattataggtgtgagttattgtatttagtttataatgttttttagaaggtagttttttttgtattatagtagtttagttttataaatgtttaattttgttgtatgtattgaatattatgttatttttgtttgtggatgggataaggtggataggtgtgtttatttttatgtttgggagtatagtatggtgttaggagggagaaaagttagggtttagtgttttgggaattatgttaagtcggttggtgttggattgtgattatttttgaggatgggttttggggttttataaagtttttttttgttatgggaggtttttaggattaaatagttatgattattattattatatttttggttattttatattatggagttgcgtaatgatgttttgtattatgttattggttgaagtatttggtatatattttttttgatttttataatagttgagtgaggtggtattattatttttatttgtaaatgtgagaaaatagaggtaaaaagaggttaagtgatttattcggagttatagagtaagaaagtggttaagtttagatttgagagtaggtttgagtaaagtttgtttgaaatttgtttttagttattttgttttgttttgttatttatttttttgtataatttttttattgttttttgttagttaaattatttttgaaatgttaaaaaatttttgtgtagaaaataaaaatttttaaaatagagtgttaggagtttagggggtgggggacgaatatagttaagtattaagatatagttaggttaggcgcggtggtttatatttgtaattttagtattttggaaggtcgaggcgggtggattacgaggttaggagattaagattattttggttaatatggtgaaattttatttttgttaaaggtataaaaattagtcgggtatggtggtggtaggtatttgtagttttagttatttggaggttgaggcgggagaatggtgtgaagtcgggaggtagagtttgtagtgattcgagatcgcgttattgtattttagtttgggcgatagagtgagattttattttaaaaaaaaaaaaaaaaaaaaaaaaaaagatatagtttttattgtcgttaaaaaacgtggagttggtgaggtggtttatgtttataattttagtattttcggaagttaaggtaggaggatcgttttagtttaggagttggagattagtttgggtaatatagtaagattttgtttttaaagaaaattttaaaaattagttgggtatggtagtatatgtttgtagttttagttattttagaggttaaggtaggaggattatttgggtttgggagtttgaggttgtagtgagttatgattgtattaattgtattttagtttgggtaatagtacgagattttgttttaaaaaaaaaaaaaaaggtatgtggattggtttagtggggtggttcgaggttcggatgggttgtagggtaatattgatttatggttgtaggagttgaggaagggatgtagttgtgaggatggaagttagagttttttttaacgggtggttttatatggtagaggagtttattgtgggcgtgattttttttttttttgttttatttaattttgggtttgttagtgtgatttgttgggagatttttaagtttttaagatagtattttataagggatttaggtggggaatagatcgtgattagttagcgatttttattattcgttatttaaaagtattagtatttttagttattttttttgggggtgggttagatttagttttttagaaaagtagagtgttaggtttttagtttggaagagggtagataggttagttttgatatttgatggggtatattattttttttgattttttggttttgttagaattttttatttgagaattgggagggtattgattttcgtttggtttttttatgatgtgtggggattagatttttggataacgaaggtgttgttgagggtgggtaggagagttttttttgagtttttagtatttttttgtttttcgtgtttattgtagaggtagtttgttaattataattttgattttcggagttggttagtcgatttttattgggaagaatttagtagtcggtgaggttttagtttttttgttgtatttttttttttagaattattttagaaaatttttgttttgtttttttatttttatgtttttttaggttatagtgtttgttttttaatgttattatgtcgtttttagattttattgttttttagattttagatatttagtttgttgtttttgattttatttttttttgtattttttttttttttaggaaggagtttcgagggggtttttttcgtcggggtgtggttttgtttcgtttagagtttttgtatcgggggatagtagatattttttttaatcgggttaagaagttgttttgttagattattaggtgggaaatagtagcgaggagaggtttattggggtggaggggttattttaggagtgttttgggagtgggcgttttattgtaaaatagttgttatttattgggtttagtgttgtatggtttgtgtagattatttatggtaaagttatttttatttatatttatgtttgaagaaaagaggtttagagaggtttggagttttaaatgtagtaagtaaagaattgggatatgaataaaagtttttttagtgaggttgaaaaggagtagtgggggtggggtgggggtggggaggatatatatttgtagttagggtaggttttggtagtatttgtgtatttatcgtggtttttttgttttgttgttattttattttggtttcgggtttttgtgtgttttagtgtttgtatttgtgatgaatttgttttgtaaggttgttgaggagattaagtaaggtaatatgttttgaagggtttttgttttgtttgggtgtttgagagtatatggtaaattttaaataaagtttagtcgtgggtattgatgatgttagaaggaacggaaataattatttatattttatagtggaatagatattgggaatttttttttgttgggagttaggaggtagtttttagaatattaaggaatagggtggatttagtggttggttgttgatagtgtgttaattagttagggaggtaagttatatttgaggttttgaattataattattattttttaaagtattatttatttggggatttttaatatgttgtatttatattttaatagaattataatttgatgataattttgtatttatttattatgtatagatagttatattataaaatttttagaattttgtatatataggatatgtgtgtattgagttataatataaaatgtttattttataaaggttgtagtaagaaaagtttgtaaaatattagtttggtatatattttattaaggtttgaaagaggaaagtaaagttgtgaaggttaggggtaaagtaggttttatagtttgtgagtgttagggttgggatggtttttagtatagtttttaggttttattagggttggggtttgttaatttgtgttttttatagttatttggtggcgtatattttagggcgtcggatgttgtatttaggttttgtgtatttgttgtagaaggtttttatgtttgtgttgttgtagggttaggttcgattggtggaagaggtgaggtttttttgttcgtatattttttaaagttttttttttttatttttatttatttcgttttatttttgtgatgtggttttttgatttttgtattttggttattgcgtttttcgtatttagtgtaatgggcgtcgggtaaagttgttggtttgtgatggtaatgagattgatattatgtttgtggatcggcgggggatagttgagttttagggatagaagttggtaagagggagtagagagtttagaggtggggtgagtgtgaggaaggtagtagaggtttggggattttaatgttatagtatttttttgaaggaattattattggggataattttatgttttagttttacgttaaagattttgtgatgtagtgaaattttgtgatagagaaatagatgaagtaggagagacgtttaaggacgagaaattaatattaatagttattattttgatagtattttatatttatatatatttaatttttatatatatatgaagtatatatatttaatttttaaaagaatttcgtgagataggtattgtttatattagtttattttataggagatgaaattggggtatagaaaattttttttggattttatagtaagtggtagagttggtatttggatttaggtagtttggttttaaagttttttatttttatgaagtagtcgtggaaagagcgttaagttaggagtttagggagttgggttttagttttggttttgtttatttgttatgagagtttatgtaaattttattattcgtgggttttagtttggggcgttatggtattatagtttatttgattataagattggagtttagagagggatagggagagtaattagtatattatataatagtaatggttatagaagataatagattcgaaaacgagaaaggaaaaatatttttatagttttttttttgaaagagatttagttggtaattttttaaggaaaagatatggttgggtggtcgagtaggttagtttttgaggagtatttgtaatttttttgtttttttttttatggattttgtggaatgagaagtttttattttttttggagaaaatagaaatttgttttttttttttttttgtaaagttttttatgggttgttttttttgtttaaagggagttttttagttttaatttggttttttagttttttttttttgttttttttttaggtgatttgttgtgaggggaatgttgggttttatgaggtgggttgcgtttttacgtttttggaaggtaggacggtgatttagtttttttattttcgttttttgaaagggaatgtttttgttttttatattgatttgattttttttggtttttgttttttttgggtgaggttttgagttttttagttttagggaaaagtttattcgttatttgttttgataattttatattttttttttggtttgtgtttttagttattatgttttttattttgttttatttttttattatatattttatataattatatgttgttttttgtgttgttttagaatttttggtgttattttttatttttgggaaggtttggagttatttgtatttaagttggggggtatttttgttttttttttttttagggatggagaaagggttgtgggttataaggttttagttttttttttttttgtgttatagttggatatttagttttgggttggaattatttaggttttgttggaagtacggtgagattattttaggaatttttttttttttttgaattatgtttgtttttttttggttagttattggagggaggagaggggttgtggattttttgaaggttttttatttatttgagggttggggtttaggaggttgtgaaggtagtattgggagttatgtttttatttttatagtgcggggttagtaggagaggaggaggtagattttattgtatatattcgttttttggagagaataattttttttattattttttttttttatattttttttgtttgttataggtggttgtaggaggggtttacgttgggagggataggtgagttggtttttggtgttgatatatttttgattttgtttttttttttgtagggggtgttattttcgtagaatgaggttaatgttatggatgtggtggtttagtttgttatttatcgtttgggtttttagttttaggatattattatttacgtttggtttatcggcggttttattggtattagttttttttttattttttattgtagatatatttatgattatttagttttattcgggagaggtggggaaatggggtggggtggaggtttaaggaagaagagagaggaagtagaatttttgagtgggtttggaagaagttattttatttgtatatattttatttttttttttttttttgtgtttagttattaaaaggaaaagtagatttaggttttgggtggggagattagggaaagtgaatgttttttgtttattatttttagtgtattatttttagtgttttatttttattttttttagatagttttttaattaagtgaagtaggttaagaaaaaaataagggataatatagggggaatggggttggtttatagggttagtgggatgagagtatgggtggtggggagaaaggagttttttttagtttttattttttttttttgttttggtattagttacgtgggtagttatgttttatttagatgttagtgttatgattttggatgttttttttgatgatttggtgtttttggttttgaaggttatgttagatagttggagtgagtgtagtttttaggtttgttttttttgggaaggggtgggttggaattgggaattgttttgagatggttttttttttttgggtggggagtaagtcgttttattgttggaagtaggaggatttttttgtttgggggttttagtttttttttttcgtgaatagtgaggatttttatgttgggtaagggttttgtttttgttatttttttatttttattttattttagggggtttggtgattaggatcgtgaggtagtattttaatttaaataacgcggagtagttgtgtaggtgagggtcggttagcgttcggtattgaatatttgttttttatatagttttgttgggcgtttaaattttgaaattagtattaaagtgtaagttggtaaaaggttattggtttatattttgagtgattttgttattattttaattggtttaattttttttaggttttttgggattttggattattttaggatttggtaattaaagggttaaggtttggtacggtaggggttttttagtagggttagattgaattatgttttttaaataatttttttttatttttgagtgaagggttaggttaagggttgtgttatagtaaggggagggtaagaatgttattagtgtagggataggggtgggttagttgttattcgtttttttttgagttttttttttttattgttttgttttttgaagatattagggttttgtattgttgattcggagaattaaggatgagattattattattacgtgagtgcgtgggaatttcggtttttaggaattttagagatggttaggaatttgttttttttatttttgtttattagaaatttgggtatttagatttttttttttaatttttagtttttttagggtatattttttttatttttagggtttttgaggatattatgtttaatcgaggtaatgattttttgttgaagtttttgtagtatcggtgagagttagggtgtgtgcgcgttgggggtagtgtatatatatagatattgatattagtatagggaaggagggaggaaggtttagggatggtgaatgaaaaaaaattagttttgatttgttttggtatttttttcgtaggtattttcgggtgatggtagaggagggttttcgagtggtgaggtagtggttggaggtttttttatagttggaggaaggtgagaagggatttagtgaggtttggggcgggggtttagtaaggttaggttgttgattggttgttatttttttttttgattagttttaatttatagtcgatgggaggtggaagaggattggtgtttgtttgtttttcgtttttattaggtagaatacgggttcgattttttttggagcgtgggtaaggagtttttggggtaggagagagggtgggaagggtttaggaaggggatgaatatttagatgtgtggtttattttgagcgttttttttttgtaggggaggatatgagtgtagatggacggcggtagttggttttgtttttggtgagttaaggagtgggaagtgggaagggtttttgaatggttagggtttatatagggggattggggatattttataagtattggaagtggtagtttttgtagagtgggtggtggatgcggaagtggagggtggggagggagtttagtggttgttttttttaatagtgttttgtattttatttgttttattttttttttttaggttcggaagtatttgtataattttgaggttatttattgtattttatttttagtttagaatttttagatgttttggtatttttagggattaattgggatttattatggaagaatggggtgagaggagatatgaggaaagatttttttatttgtgattttttgtgtttatgttgttgtttatagtttgtggaaagtgggggattatttttttttttattattgttttttttgtacgtttttttttatttatgtggttgtatttaattttttttaatatatattttgtattatatgaatggattatttttaataattaataaaaaggtattttttttattatttggttaattgtataattttttaagtgtttagggagttaggggtaggtagtggggagagtagaggttttaaagagttgggttttgggaaattttaattttagataatttagttaatttaattttttttatttttgtgtttttttaggtttttagtttttaatttgagttttttttaggtagtaggtttttaaattttttcggtttttgatgtgtttattgttattataattgtgtagtttttttggtttttttcgtttttttttttagttttttttgtatataattattttaggagtttatggttgtttttttttgtttacggtttatgagttttttaggattcgattttatttatttagtgtttttgttggtttttaggtttaatttgtatggtgttattagtagtatttttaatttttattgtttattttttgttattttggtgaagagtgaggaagggtttgttttttacgttttatgtagtaaattttgtatatttattttgttatgttattaagtttttgtttttatagtttttttgtagtttaataaatataggttttgttagggacggagggttaggtgttaaggatttatgtttttttagagttatattttgttttttggacggttttgttaggagaagatgtttaggttgtatttgaggaaattggttttttataattgttatttatttttaattttggattttgtggaatatagtgaataaattttttttttatttattggtttgttgtttggtagttttttttatttttttggagatggagttttattatgttgtttaggttggagtgtagtggtataatttgagtttgttgtaatttttattttttaggtttaagtgattttttagttttagtttttttagtagttgggattataggtatgcgttattatatttagttgatttttgtatttttagtgaagatgaggtttcgttatgttggttaagttggtttcgaatttttgattttaggtgatttaatcgttttggttttttaaagtgttggggattaaaggtgtgagttattgcgtttggtcgttggttattttttttatttggaaattttttttttttagatgaaagattttaaagtttatcgttttgagtttatttttgttttgttttgttttattttgttggggatggttttttgtttgttttttgagatggatttttattttgtcgtttaggttggagtgtagtggtacgattttagtttattgtaatttttgttttttaagtttaagcgatttttttgttttagttttttaagtagttgggattataggtgtgtgttattatatatagttgatttttcgtattttagtagagataggttttattatgttgtttaggttggttttaaatttttgagtttaggtaatttatttattttagtcgattttattttttttttttttttttttttgagacggagtttcgttttgttatttaggttggagtgtagtggtataatttcggtttattgtaagtttcgttttttgggtttacgttatttttttgttttagtttttttagtatttgggattataggcgtttgttattacgtttggttaattttttgtatttttagtagagacggggttttattgtgttagttaggatggtttcgattttttgatttcgtgatttattcgtttttgttttttaaagtgttgggattataggcgtgagttatcgcgttcggttaattttatttttttgagtaagatatttaacgtgggcgataatgttttaatgttttagatggagtttttggttaaatttttgtgttttttttaaatttagtgtatgaagttttttttgaaattttagggtagaggttgtgtgtgtttttattagcgttgtaattttttaagggaagatatattgagtttttattggaagtggagatttgagatttaattaggtgatgtgatgtttgaaatttggagttagaagaggtaggtgattatagttttataatgttttatcgttagtaaataggtggatagttgatattggtgtttttttttttattttattttaggggggtaaacgatgggaagtgtggaatatgaagttttggagttagttgtatagttttgaattttatttttttagatttaatagaagagttaattttttgaaaattaaatttttgtttagttaagggaagttttttaaatgtaaagaggagttgggtatggtggtttatatttgtaattttagtattttgggaggttggggtaggaggattatttgagtttagaagtttaagattggatagggtaatatagggagattttattagtataaaaaatttaaaaattatttaggtatggtggtatgtattcgtgttttaagttattttggaggttgaggtaagaggatcgtttggttgaggattacggtaggttgaggttgtagtgagttgtgatcgtgttatcggattttagtttgggtgatagagtgagattttgttttaaaaaaaaaaaaaaaaagtaaataggggtgtttagttttattttttatattttggggataaaggatatttttttttggatatggttattagggattttgttgaattgtttttattgttatttttttttattttattgtatgtaattgtagataatagtggatgatttgaggggtttttagatatttgaaattgggtagggaaagaaaggtaggtttaatatgtgaattttgaatttttttatttaggggttttagtttattttagattattttttatgtaataaggtttagagtagttgtgtttgtttttagaattaatttttatttaggggtggaagtaggtttttgtttattttttattttatatagtaaagttttagtagttttaggggatgattagtagagatgtagatttttttagttgttggggcgttggattttgttatattggatataaggtgaggtttgaaagtttaggtattttgaggagttgggtaaattagtagaaaagatggcgttgggagaaaggaaagttagattttggacgggaaatttggaaagaagtggtttttagttgggttaaaaagttttattttacgtcgttttatcgatttgggttttattttgagtgtttttagtgtgaggtgttggattggttttgtgttgtttgtttgggttgagggtttgtttttaggagaggtatgtatttttcgtatagttgttataagcgagtgagggtttcggaggtggagggtttaagagggtggggagtttaggcgttagtgatagttagatttttatttatcggttcgttcgttcgtttatttatttatttatttatttaattaataagttatttcggattttttaggaatttagttatttatttatatttaggttaaagattttttttttggtttttttttagaacgtaatttcgagtcgtttttttaataaatcgtggttttttttcgatcgggttatttatagtttcgtttttcgtttgtttggttttatttttttaattttggcgttttgtttttaggtttcgttttttttgtttcgttattcggttgtttatttttaggtattttttaattttaggtaggagtatttagaagggatatcgttatttgttgttgtcgttatggcgattatttaacgttttgtttttttattttaggaaaattttcgcggaattcgttattatggaaacgaattttttggatttttagcgcgttttgggttggttttgttgggtggataggagaggagtaaaacgtaataaagacgggattaattattcggaggtcgcgtttttttcgaagaaggttttattttgtttcggttttattttttttcgaaataattcgaggaaatatttcgcgaatgttgggtgggtgttttgtttttcggtttttttaaggtttacggtcgtttgaattttatagtaagttttttcggattttttagggtaattttttttcgaagtttagttttagtttcgtaaagtttttagtcgttggttttttcgttgcgattatattcgagagggagttttagagggcgtcgcgaagtttttttgtgttttttttttgttttttgtttttttcgttttaagaggagttttggtttttttttttttttttttttttttttttttgagacggagttttgttttgtcgttaagttggagtgtagtggcgcgatttcggtttattgtaattttcgtttttcgggtttaagcgatttttttgttttagttttttgagtagttgggattataggtaggcgttattatttttggttaatttttgtatgtttagtagagacggggttttattatattgtttaggatggtttcgattttttaattttgtgattcgtttagttcggttttttaaagtgttgggattataggcgtgagttacggagttcggttttttgattttttttgtttattattttgtgtatttatttatttaagatatttatgtaggtgtttcgcgtttttttgtagttttttattattttggtttttttttaatataatttattttgtgttattatttttttaagatagagttttattttgtcgtttaggttggagtgtagtggtgcgatttcggtttattgtaatttttgttttttaggtttaagagatttttttgttttagtttttcgagtagttaggattataggcgtgcgttattatatttggttaatgtttttgtattttttgatagagacggggttttattatgttgtttaggttggttgcgaatttttgatttcgaatgattttttattttggttttttaaagtgttgggattataggtatgagtcgttacgttcggttaatttttggtatttgtagtagaaacggggttttattatgttagttaggttgggtgcgaatttttgattttaggtagtttattcgttttggttttttaaagtgttgggattataggcgtgagttatcgtagttcggttttaatatagtttttaaatttatttattttaaggtttttgggaggcgtttagtggcgtgtagttttttttcgaattttttttttttcgtagtttttttgggcgggcgtttttcgtttgtttttttttatttttttttttattattttgggattggataatttttgaatagtttgggaggtagtagggaattcgagttcggagtttcgattagaatttttagacgggaaattggagtaggtggtgtcgttttaggacgttgaggattatttttttttttaacgtatagtttaacgattttaaaagtaaaaattttgagtttttgagttaagattgagttggtggggtggggatcgagtaggcgtggatggggagtttagcgggtttttagcggagaaaatgggtgagacgtttggggtcgcggtttttagaattcgtttgggagggagagtggcgttacggcgtcgtttttttggggagtcgtttcgggtttcggatgttcgttggggttcgacgtttgggtttcgacgcgcggttcgtattttttaggttttttttttagggaatagagtttgagcggggggttattttttcgttttatcggagttttgaggtgcggttaggcgcggagagcggacgtttagcgttagattttgtgggtttcggagtttaggtttattgagtcgtagttgagtataggcggggtaggaaaaaggatgaggtgagggaaggcgttgggtttttggaattttaagggagtattgagttgagtacgtatcgtttgggatttaggtgtttttgttttaggatgtttgataggtgtttttagggtatgagaagtgggattgggtattttttatttgtttttttttttttttttgagatagattatatgttttttattttggaaaatggtattatttttttgtgtaagtttatttttgtttttttatttttcgtttagtttaatagtaaatttgtttagttttttaattgtattttaggtttattagtttcgttttttcgtttttgttcgttttttgtcggattagttcgttattttgtgatcggattcgggaatagcgttttatttttcggcggtttttatttttgatttaaatgtaatgtgtagttatggtaattttttataaatagaaattcgattaagttatttttttgtcgaaatttttttggttagtggtttaattgtcgaggtgtttttggtagtattttgttttttttatattattgttggtggatttgttttttttattagattgtgttttgtgagggtggagattttgtgtagggttgtatttttaatatttgatgtagtgatttaataaatatttgtttaattaataggaaagatagtttttttttttatttttttattgttggttttttgtttttaagtaggatgttatgttttagagtggttgtgggtgcgaatattttgtttttttggttggtttggtattgatttttattttgagttggtgttgtttttttttttttttttggttaattttttttttattaatataagtttaaattggaggttagtaggtagttatgcgttttatggtaggttttgtagggagttagagtttgggttttttgtgtttttatagtagtttttaagttttttatacggtttttttaatagtgttggttatgatgagtttggtgtttggtaagtggttttaagggtttagaagggttttttggtttggatggagaaatttatagatattaagtgtttgggtatatttgtttaggatgtttaggtaaatttatgtaggaggagagatgggatagatgggtttggtagggaatgtttgtttatggattgatgtgtaatttgaagatttttaaaaatttattattattattatttttgagatggagtttcgttttgtattttaggtcggagtgtagtggcgagatttcggtttattgtaatttttatttttcgggtttaagcgatttttatgttttagtttttcgaataattgggattataggtataagttattaagtttagttaatttttgtaattttagtagagatggggttttattatgttggttaggttggtttcgaatttttgattttaggtatttgttcgttttggttttttaaagtgttgggattataggcgtgagttatcgtatttagtttttgaaggagatttttagtgattattttagggttgttttattttatagtagtgatttgaatagagatattgaaggaattttttttggatttgagggtaatatagaatagggagggttagggagtgtgttggatgagaaaattagaatttataggatagaataagattgagtttagtttgttgggttttttatttggttgtaaagtattagttatagagatataggatttaaagtgttggtttagtatttttttttgtttaatattaagtgttttgttgggtttggggatttgttaatatgtggtttggttttaggattagaggaaaagggggatgtatgtgtatgtagttggggaaggaagtagagaattggggttttgatggttttttgagataggaagggagggaggagtggggttgagtggtttggaattaggtagtggtagggtgtgaggtagaatggggtgtgagtggggttagtatttttttgtgttttaggtaagtttgtttttgttaattgggaatttttttaattatttttattttttaaatatttgcgttgttatcgatgttttttggagattaaggagttagggtgttttttgggatttgatatttgttttattttagttggtagtagttgtattattttttataaaaagaatagtaagtggtttttttttgttatgggtttagtatttttttaaacggaaatttttttagttttttaagttgtattttaagttttgtttttataattttataagatattgttttaattttgttttttttttttttgttgttttgttatttaggttggagtgtagtggcgtaattttggtttattgtaatttttatttttttagtttaagtaatttttgtgttttagttttttaagtagttgggattaaaggtgtacgttattacgtttagttaattttttgtatttttagtagagatggggatttattatgttggttaggttggtttcgaatttttgattttaggtgatttatttattttagttttttagagtgttgggattataggcgtgagtatcgtgtttagtttttttttttttttttttagagttatattttgtttttatttttattaattttttttttttaatttgtagttgaatagtttttattttattaaggtgcgtagttttgacggggattttttagatttttaggtgtttttgtttgtttttaagttgtttgttttcgtatttgtttgtagttattgttggtgttgttttttttttgtattttttacggtttttttagttttttttatggagcgttttttttttgatttttagtggtttatgtttattaaggtttggtttttagttgtttttttattttatatatttaaaagtagaggattttatttgttttgttggttttaattagtagttatatattatttttttttgaatttgaatgttatgttaaatcgttttttttatatttcgttgattattggatatttttttcgttgaaaattgattttttttcgatgtttgtttttttatcgattttttattttttttaagttagtaaaaacgtaatatataatatgtgttaggtattgttttaaatatttgtaattcgttgaggtaggtattattattatgtgtattttatagatgaggaaataggtgtagaaaggttataattttgtttgagttttatagatgttgagttagaatttgtgatggttttagagatggtgtttttaataattattgtatgtagttgtttgtgtttaagtttttttattatttttttaatatagtcgatgtatagatgtgggttaaatattagagtatataatattattaaattaaagtttttcgttattattttaatttatttggtttttttgtatatgtgattattttttttattttttggatgattttttttgtaattttttatgtatattttattttgtataaatatgttgtttattatttttttattttttttttcgttttaatttaagatagtagtattttattgtaaatattattttatatttaagttaggggaattgaatgtttcgatattagtttgtaaatagtttttttgttttattgatttgttgtatattattttatagtatgcgtatattatagttgatttttttattttattattgatgggtattttggttattttttttaagtagggtagtagtaaatatttttgaatatgattttttgggatgtaggtataaagatttttttttattatgtataatagtagtagatattattttatttttttttggtttgaaaaataaataataatatattttttttttgttatttaatttttaaaatattttttagtttttttttatatggttttatggtgttagttttttttatttggtttagtaatttttaattttttttttaattattatattttatatggttttttttttttagttttgtatgggaattttagtggagttttatggttggtgaatattgggtatgtttatttatgtttaattataggaatttttttttttttttttttttttgatttatgagtgtggggatgagaggatttggggttttttttggggattttcgtattattggtgtttattgtttttttttaggtagcggttttgacgttatggtgagtgattgtcgaagtaaggagtagatgagtgattgtttaaatattcgaattttttcggtgtttggtttttggatatttttttaatattgttttttggatttttgtaatgatttttaaaatagagggttttatattttttagtgtgattgtagtaaattttggtgtaaaattttattagtttttagttatttttttgatttttatttgggtttggttaggatttttagttttttatattagttttttttgtttttttttagttattggattttagttttggtttttttttttggttgacgttttttagtatatttattgttattttgtatttttagttttattgtttattaggtttttttttttgttttttagtttttggatgttttttttaaataaatttgtgtgtaaattgtttggtatgttttttttttttggtggaggtgaaggttgagggaggtgtatttgtttaattgttttattatgggttaggtaagggatttttagttttgttgagttgtttttttgttttgttttggtatgtgatttgttttagatataaaaagagaaagaggaaatgaaagtttttttatggcgaatgttagaaagttagtgggtattttcggtagtgttgttagattagagttgtgtgggggttaggggcgtttagagggttatgttggtgggaagggggttgcgaaaggattaggtttaggtagaaggaggtgggtgagaaggttattttttttttgagatagttttattgttatttaggttggagtgtagtcgtgtgattttggtttattgtaatttttgttttttaggtttaagtgatttttttgttttagtttttcgagtagttgggattataagtatatgttattatatttggttaatttttatattttattagtagagacggggttttattagttggttaggttggtttcgaatttttgattttaagtgatttgtttgcgttggttttttaaagggttgggattataggcgtgagttatttcgagtcgagaaggttatttttaaagagatgttagattttattggagttttggtttttttaattttgggttaagttttttagtttttgagggtgttttttaggttgatttgttataaatttgggtttttttttgttttatattgacgttagaggttatggagaagggtggatttagtaaggtgggggttggggggtatattaagggtttgtatttttttttgtacgttaattgttttatgatttaattattattggtttggtatttttcgttagagtataggttatatagatttgttaatacgtgtgtaaaatattatataggtaaaagtagatgcgtacgatgttatttttattaagtatagatagaatttatttaagttattattagttaggatagcggttattttagagttgggaagagtatttgggagaggggaatagaggtaggtttggttgcgggtaaaggtttttacgttgatttggtggttggttatatagatgtgtggtttataaaaatttattttgtgatatgtgtaagtttttgaatgttttattaaaaaggtttgaaaataagtaaattagttaggtgagtatggtggtgtgtaattgtagttttagttatttggaggttgaggtagaagaattttttgagtttaggagtttaaggttagtttgggtaatatagtaagaattttagaaaaaaaagttgaatattgtgtatgtatttgattttagggtaaatatatttttttgagggggaaaaggttttaatttttatttgtgtatgtatatttatatgtgtttttttaattatttgaggtattatttttatttgataggtgattaaggtggggttgaagagattgatatatttaagtggtagaggggttgggattggattttttagttataaagttgtattgttttttagaaaaaggttttataatttaagtattgggttgtaagatttggaagggtagatatttggttatatttatttgggagttttgttgtttaatattaagtttgatttagagtagcgttatgtttagtatgtttatttagtgtatggaaaaggttgttgtatttatttttgttttttatacgtttgtattattttaaaattaaaatattagtatgaagatttaattattgtagtttaatattagtgtttttagtattttgttttttaaattgggtttttcgagagggtattttggatgttagaatttttgaaaagaattaaggaatggtaggagtttagggttttagtagtaggtaattttggtatgtggttttgagtttttgagtttttttggtttaaagagaaagttttttttttttttttttggagatagtttcggtttgttatttaggttggagtatagtggtacgatttcggtttattgtaaattttgttttttaggtttaagcgatttttttgttttagttttttgagtagttgggattatagatacgtgttattatgtttaattaatttttttttttttttttttagtagagatgggtttttattatgttggttaggttggtgtcgaatttttgattttatgattcgtttgtttcggttttttaaagtgttgggattataggtaagttatcgcgtttaggtttttttttttttttttaagatagagtttcgtttttgttgttttgtttggagtgtaatggcgtgattttagtttattgtaatttatattttttcggtttaagtaatttttttgttttagttttttaagtagttgggattataagtatgagttattatgtttagttaattttttatatttagtagagataagattttattatgttggttaggttggttttaaattcgattttaggtgatttatttatttcggttttttaaagtttagggattataagtatgagttatcgtatttggtttaaagtttttttttttaggtgaaaagatttggtattattagggtttaattttttaggttttgtagggtatgtttaaggttgggaagaattatagtttttatgttttgatttttagttaagtagagggtggggagggatgtgtgttttttataggaggtcgagaggaagcgataaacgttaagtgtaatggagagggttttgtaattttatttggattttaaattttattaatttttttttttttttttttttttttgagatatagttttatttttgttgtttaggttggagtgtaatggtgtaatttcggtttatcgttatttttattttttaggtttaagtgatttttcggttttagtttttcgagtagttgtaattataggtatgcgttattaagttcggttaattttgtatttttagtagcgatggggtttttttatattggttaggttggttttaaatttttaattttaggtgattcgtttgttttagttttttaaagtgttgggattataggcgtgagttattgcgttaggtattaaatttttttaatttgtgtttatttgtttatatttgagtttgattttataaataatgtgatatagttttagtttagttttagtttattgtggaggaaaatgggggatatggagttgagtagaatagatttttttttttttttttataggtttttagggagatgggtgttaggatttagtgaagtgaaatggggtcgaggaagttagagattgataagagagtaagagaggataggaggtagaataatattaggataggcgggggttggtggagatagtgaggtagggatataaaattgttaagttaggatatttgtatagaattttattttttatttttttttttggagacggagttttattgtgttatttaggttggagtgtagtggcgcgatttcggtttattgtaatttttgtttttcgggtttaagtgatttttttgttttagttttttgagtagttgggattatagaggtgtgttattatatttagttgatttttttatttttaatagagagcgggttttattatgttggttaggttggttttaaatttttaattttaagtgattcgtttatttcggttttttaaagtgttgggattatcggcgtgagttattatgttcggttttttcgttttttttgttgttagtttagtttggtattgggttttagagatatggataagataggggaaatagagttagatgttaataggtaggtgattggattgagagggatgggggatattggaatatttagatgatggggaaggaatggaggaattattgtgttttttttaggttagtttgtttgggtagaatttatattagagatttttttttagggggaagaatagtattagagtttagttaggtatagtggtttatatttgtaatttcggtattttgggaggtcgaggagggtagattacgaggttaggagttcgagattagtttgattaatatggtgaaatttcgtttttattaaaaatataaaaaattagttaggcgtggtggtgtacgtttgtagttttagttattcgggaggttgaggtaggagaatcgttggaattcgggaggtggaggttgtagtgagtagagattatgttattgtattttattttgggtgatagagtaagattttgttttaaataaataaaaaaatagtattagagtttaagagagaaaattatataaaagttatatagatgttagtggtataatagacggaggtttaagaaattatagtgattaaagaatgtgggtgtttttagagagggtagtgtaggatgttgagggtgttatagaaagatatttgtattgtggaatttaggaagggtgaggtgttaagagtttagtttggggaagaattaaaagttttgaattattgaggaataagtatatgcggcgtagtttagtaaaagataagtttaggtttagggatagtgtgattatggggtttaggttattaggtttcgttttagtatggaaattggggaggggtagggagaggtttagggtttggtagaattattgaatttgggagttagatagaggtagggttaggggtttgttatggggtttcggtagagagttttggagttgggggtttgattaggagttgtaataattgtattgatagtattgggtttgatattagtattttgtaaagtaggtgttgcgttttttttggtagcggtaggaaatgtattgtttatagtttcgaacgatgaagcgaattttgatatttgagggagaggggaaagttgataattttttttaatagttttttatagtttaagaatttttgttattgattttttttattttttatttagatttaatttatttttaatttagagttttttaagaggttagaaaagtgagttttgttggttttttagaattttagatttttttttttaagatttttttggttttttttgagatagggtttagttttgttatttaggttggagtatggtggcgtaattttggtttattgtaatttatgttttttgagtttaagagattttttattttagtttttcgagtagttgggattataggtgtatattattatgtttggttatttttttgtagagatagggttttattatgttgtttaggttggttttgaattttagagtttaagtgatttatttgttttagttttttaaagtgttagggttataggtatgagttattgtatttagttttttttttttttttgtattttatgttcggagtagttttgatttgtgagaggagagaagattaagttattggttgttttattagtagtttttttttgggattttatttattataatagatggtgattattatgtatagggatgagttgttgatggtatatttttttgagtttgaaatgtattttatagaagggttttttacgaggtagaagtggtacgttcggatgtcgggaataggaattggggaggtagaaggagggatggaggtattgggttatttttaaatattttgggttagtaggaagttcgattatttatggttacgttttattttttttttggatttagttatttttttttttttttttgtttttgggttttatttatttttttttattgtgaagtttattatgattagtatatttataagtatatggatttttattttggaattttggggagatgggtagtttttgaggggatgttttgaaattttatttttttgtgattatgttttttaattttaagttgtagggtggttttgataaggtttgagtaggagttgttgtaaatgtagagttatatttttatttggggtaggattttggttgggaaggaagttattatttggtaggagggatagtatgtttttatttataacgtttggtttttgagtgtgggagtaatggtttagatggggtaatatttgggtattatcgggttttttatttagtgtttatttttgttttgtatattttttaaagatttatttttttttttggaaagtttatgggttagtatttatttttgttattatgtgttgttttcgttatataatagggttaatttttattgtgttgggataatttggttaggaaattaagtatttttatttttttgagatgagtagttttagttttattagcggtaggtatatatatattattgagtagtaatttcggattttgttttatttcgttttattttttagttagattgattttaggttattttttttttagaattaaaattaaaagatggagttgttgattaagttttttatagtataaatagatagttatagatatttaaataaatattttttatttttgaaatatgttttgttttttttttttgattttgtattttattatacgtagttttaggaattttgttttgttttatattaaaaatattatttaatttattgagtataaatttgttttggtttttaatttggggagggtgggttgggttatgagggtttttggagtttaatatattattatttttttttttttaatagtaagtattagtagattagtttatggtttttttttttattttattttatatttttattataataacgatttttttaatttaaattaaaaattatatagggtttttgaaagggtggtaaaaaagaaaggaaaagttaaagattgtaggataggtgggggagggaattagcgaatcgttttgattgggtttttgaagttgttggcggtttggagttgtagttggtaggttatcggatggattttgaaatcgtagagtttaggttagggtagaggttagagaggtagtagtatgagttttatttaggttttgttagttatttgtatttttatttttttatttgagtttttttatggatttgtttagagttaaagtttcgtggtttttaattttttagtttaagaatattttataataaggtaatttaagtatagataattaaataatttttttatagttatttagtagggagatgttttgattttgggagaagtagattttaagaaagggttatgttttgtttttttttttttgggggattttgggttttttttttgatttttaatgattttttttgttttttatttgggtataaattggttggtaggttttttgggtcggtattcgggatgtattatgaagagtatgtgagggaaattagtgtcgaagtaggcgttattcgtgtgatggtgttttgatgatttgggtgtgtatatatttatgtatttggggtagtagagttttattatggttttatttgggatgtttgaaaggtttgggagatagttagatttagtaggttaggtatttttttatttttatttaatttttttttaggatttaggttttaatgtgttgagttttaatttttttttataagattgttatacggtgttttttttttttttttttaatatttattaatgggaagtattggttggtttttatagtatatacgaggatagtaattaaagtttttttgttggtatttttttaattgaggtgaatataatggaaggggttggtaggtagatgtaaagaagaggtaatttttttcgtagtttaatttatattattttgttttttattttttttatttttgtttagaggttttttttttggattagatgggtttttaaatttttgtgttgttttttttttaattaggtaggttataaattattagagttatttgttgtttgttttttgaggaagaggtagtttattataattttttgatttaaggtttgtttttttttttgaaaataatttttttaggatgatttttaattagaatttaatttttaggtttaagttttggggttttttttttttttttagttagtttttttaaatagggtttaaatatgattttttgttgtaggaatttgtgttttttattgtttagaaggaggtaggtaggagtagagaggttttattatttgggcgatgttacggttggtaaggatgtagcgggcgtggattaatttataaagtatttcggttgtttgtttaattaggttattttggttggggttgttttttagttttttatttgaaatatagttcggttaaatgtaattatttgttttttagtttttttaggtgttttgtttatatttaggggttgcgggttatttagtttgtttagtatttatttttgggttttattttatttaatatttgggtatgggatttagaaatttgggtttttgatttttgtattaaacgaagatagttttgttttttttttatatttttttagtttttgttttttgtttttttttttaattttttttttaatatataattgtaataatgttaatgtagaagatgaaattttagattggaaggtgtaaagtaggagaaatagataataaattagatttatgaggaaacgtatgaggtttgaattgcggatttagaaaatatgagaataagtgatatacgttataaaattagataagagttaggtggaggattaaaataaagtatgaatttggggttaaagaaattagagaattaaaggaaattttaaaatttaggtaagtgaatagagatttgaagagaaaaatagtgtacgtatatatataaaataattttgagggtgttttattaggttttaggtttaagattatgtttagagtttgtcggtagtgagggatttgtttattgagtttagtaagattaaatttgttttggatgtagtttttatttatttgttaggatatggaagttaagagggaatttatattaaaatttttatttttgatttgggtaaaatgttttaagtgatgttttattattaatataattgtatttgttgtgtttgttttttatttttaatttagtagaagtatttgtgtttttttttagtttatttatatttttttttataaaagttttggttttttttttttaaggataagtagatatagtaattttttttttagatattttttttaagatttttgtttttattttatttttgtatttcgtttttaggaattagttttgtttttttagttggttaaggaaggtggaagttgaatagtatggtttttgaataaaatattttaatgtgtagtattttagtttttttaaaggttatttgagataagtattagtagtgttattttagtaataaaagatataggtcgggcgtaatggtttacgtttgtaattttagtattttgggaggtcgaggtaggtagattatttgaggtttggagttcgagattagtttggttaatatagtgaaattttgtttttattaaaaatataaaaattagttaggtatggtggtaggtatttgtaattttagttatttgggaggttggagtaggagaatcgtttgaatttgggaggtagaggtggtagtaagtcgagatcgtattattattttttagtttcggtgatagagtgagatttagttttaaaaaaaagaaaaagatataaattgattagtttaacgttatattgttggacggtggtagatttaggatttgggttttagttttgttattttagtataggttcgtcggggtttataggggggattttttgttgataggaagtttttaaatagtatgtaagagaatagtgtagaagtggaatatgtgaaggaacgtttggtgggaagatatgtgaagttggtaagtagggaggttgaagagaatttattttatagaagaatttattgttacggagtttatagaattaggaaatttaggatattttttttgagttgtttatttttacgttagttagaaaaagaatagtgttagtaaagtttaagttttttttttttgtttttggtattttttttttttttatattcggttttttaattacgggagaattcggaattatttttttttaaagtaatttaaattttgaagtatttttttttagtttttttaatttatattttagttttttttttttgaagttaaatattttttggggttttattatttgaaagaagttaatagatattttgatttattagttcgatttatatttttggagttttcgaaggttagggtttttttttttttgtgttaatttcggtagggatttcgatttaggttttttattaatataagtttttgtatgatttttacgttttttttaagggtttttaagtttattatttttaagtaagaatcgggttttttttttttttacgggttgggggcgattgttaggttttttttatcggaatttatatatttttttttcgttttttaggttatttttttttttttcgtgtcggatttggtcgttttttttttcgtttttatattaaagttcggagattttatgtgtcgtttttagcgataagggattcggagtagcgacgattttagatttatcggttggacggggattaggattggggtggggtagggaagttgttatttttagggaacggcggcgatcgttatagcgtaggtcgcggattcgatcgcggtaggcgaagtggggtggggggagtggaaattagggagggtggggaagagggtaatacgtaagcgttaagggttaggtgtcgcggtggatgtcgggatacggagttttcggtagagaaagaaattggttaaatgagagaaagcgaattattaattttaggatgattcgcgtacgatttggttgttacgaaggttcggaggagggcgtttgcgggcggggtataacgagaagttatcggaagcggaagttaggtatggcgttcggggttcgggagtttgggtaatatagttttgtgtttattgggtgaagaggttgatttagggcggggaaaggaggaagttaggttggattttttttcgtagttttttttacgtttttttttagtttcggcgcggcgttgttgtttaggggattggtttattttcggttaattcgttgggtttttattgtttgttgggtttttagtgcgaattagtttcgttagagatttttgacgggtatattgtttttttcgggtttttgttttatgaggggagaggtgcggtttggtttcgtgcgtagggatttgggtggggtggggtgggcggtgtgagaattggaacgttttagtgcgttaatttgaggtggtgttagttattttgttcgtttttttgtatttttttatttttttttaggttttaagtgtgattttcgaattttggttagagtaatggtgaggggtaggcgtgacgttattttattatacggtttttcggtattttataggttttttttcgttttttgagggttttttttaatttatagagtggatttttggttttagaaaatgggtttggagcgggggttacgttgaggaaggcgaagggtattgtgggggcgttatgtaaaagtaggattttaatcgatagattttagtgttcgcgttatttgggcgcgcggagttttgttcgtttattattgaaaaagttttagcgcgggaaattgaattcggagttttgcgtacgttcgagtttttaagtaatgtgggttgtggtttttgttgttgttgtcgttacgtatgcgttttcgtgtcgtgtggttatttgattgtgttaatttttttgattagaatggcgttattttgcggtacggaagttatatagtaatacgtataggagatttttttcgagattttttagggagtgatttatttatttttgtttgggaagaggaaatttcgaaatgggatcgcggaagatttaaagggttaggttgattttttttttttattggtatgttttacggggtgggaaagtggttttagaaagaggttggtgtttattgttggtgaggatgggggtgggggtcggacgtaggatttttggataatagttttatggagttttattaatttttattaaggagtaaagtcggtattgtagggttttatgtttttacgtaaagttttttttttttaggttttgtagagttttaagttgtggggttattttagtggtaggaaagtgtttttgattatttttttttattttagtaggtttttgaggttgtggttgttatagggttattacgagtttggtttatttgttttattttttttttgtttggtattatttttttagtttttttaaaagttatgtttcggtttttgtttattatttttattttagttattgattttagcgatttttggaaggatgggtagtagtagttatagttcgagaagttagagtttattttggatggggttgtagttcgagttttttatgaggttttgattggggatgagagtagcgtttttgatttttagagattttagattgaatttgttagagaaagaaagagaaagaaaagaagaataatgaaggtattagtagtagaagtagtggtagaaggagtattaggaagatatggataagggagattttttgaggttgaggataagatgatttatcggatattgagggtagtttaggagggggatttgttagaatttaggagattgttggaatcgtatgaggtaggaggagttggggggaatattaacgttcgggatgttttttggtggattttattgatgtgtgttgttcgagcgggttagggggtagttgtgagttattttttgggtcgtggggttgtttgggtgggggtttgtgagttgagtggtagggatgcggtttagttcgttgaagaagttggtttttttgaggtagttcgtatggttagggagagttatggagagataaggagttcggaaaatcggtaaggggaaattttagtttagatttatgttttattgtgttttgttttttttagttatattatattagacgttttagtatagtgttgaagagttttttttttatttttatgtgtaggttgatagggtagtatagttaagtggttataaatatgagttttttggatttaaagtttgattttatttatttgggtaaataatttaatgtttatatgttttagtttttttattttagaaatgggggtagtaagaatcgttgttaggatttaatgggttaatatatgtaaaatgttagaatagtgtatgtcgtatagtatgtaatatatgaatgttagttatagttattatgattaatgtttttttttttgtttaagagtttgttaggtttggttattattttttttttttaattattttgttttggattttataatggtttaaagaaatttgtttttaagataagttaagtgtagtagtgagaaggaggggaaaagtggagtaaggagtttgatttgtaattgagtgaataattaatttagataatttattattatttttggattagtttggattttttattgttaagtaggaaggaaggtaatttgtttttttttttttttttttttttttttttgagataaagttttatttattttattttgtcgtttaggttggtgtgtaatggtgtgattttagtttattgtaattttcgttttttgggtttaagtatattttttgtagaaagtaggttttgtcgggatatggtggtatgtgtttgtaatttcggttatttgggaggttgatgtaggagaatcgttaaggtggaagttgtagtgagttaggattatggtattgtattttaatttgggtagtagagtaagattttattttaaaaaaaaaaaaaaaaaaaagtaggcgttgttattttgtttaggttggttttaaatttttgagtttaaagttatttgttcgtttttgttttttaaagtgttgggattataggcgtgagttattatgtttagttggtaatttgttttttagtagaaaagttgaaaagattttattttattttgttagttttttttgaggttttaattttttttttttttttttttttgtttttaatgtttttttttttttttttgtaggttttttattttttttttttagtattgcgagaattgtgatatttatttttaagattttaattatcgtatatttattgtttatttgttgttattgtcgtagggtttttagttttttaattttttatttggggtgtttatttttagttcgggttttaaattgttgttgagggggggttgggagttaggaatggggttgggatttcggggtgagggtcgtgttaattttatttttattgtttttaagagagattaggaaggattaggttatagattagtattttagtttcgagtgatatattttttagtttgggatattcgagttgtggttgggagggagagattttttcgggtggttatattgagttggagggaggagagaaggagggaggagaaagatagggtttgggagcgggatttaaggatttatatgaatttcgagttttgattttggtaaagtttgattttagtttgttgttgaagtttgaatttgggtttttgatttgggttttttgattttttttttttgggatttgtttagatgtagattttgaagtttttggttaataggttttgttttcgtgagagacgggttgagagttagaaataaattaattatttgtggtttatttatttttttggaagttattttgaggaagttaaatagaagtttgggagttatatgtaagttttatttgagttagaaggggtagtttttttaggtggtatgataaggttatttttttgttaatttgggtttatttttaggttttagatttttttgggagttttttatttatttttttaatttttttggattaagaattgtttagtttcgtgtaagttttattttttttaggaggagttttttgattatagttaatttattgattttataaatataagtttatatattatgtgttaagaatataggtaaagatatttttaatttttaaagagtttatagttggagagggaaagtgttatgttattaattttttttttttttttttgagatgtagtttcgtttttattgtttaggttggagtgtaatggtatgatttcggtttattataatttttgtttttcgagtttaagggatttttttgttttagtttttttagtagttgggattataggtatgttttattacgtttagttaattttgtatttttagtagagacggggtttttttatgttggttaagttggttttgaattttcgattttaggtgattcgtcggtttcggttttttaaagtgttggggttgtaggtatgaattattattttcggtttatgttattaaatattataatgtagggtgataagggaagttaaggtttttagagatgagaatgggtagggttttgttggaagaggttagtgtgataggagggtttacgattattaagtttgtatatttagttgaattgggattagaattttagtttttaaatttaaattttaagttaaatttttttgttttatttatttgtttatattttttttttttatatttttttatttttttattatttatttttttgttttgtttatgtcgggtggtaggtataagaagagtttattgttgtgaaatttaggaatttaaatttgtagacgggtaggggagggttgtttaagtcgtaagattttttatttttttttttttgggaaagttttttatgaagttttggatgcgaaatggaggagtggtgggggatgtggaaaagaatttaggggtagggggttgtagggggcgatcgagtttagggaagtatgagaaattcgggaaaatggggagttgggtttatattaaggttttggtttttgttaatttcggtttggcggttcggcgcgtatagatagcgcggggtatacgggggcggtttattcgtagggttcgttttatgagttgcggtatcgttttcgcgggtttttttagttttggtgtagttgttttcgggtttcgcggttttcggcggttttttaaggtcgcggtttcgacgttgggttcgggagcggttttcgcgtatagcgttcggacgcgtaggtttcgaagtaggttcgcgttttgtttcgtaattggggatttttgaggatattttagttttgattttgtggaggtcgcgtttttgttgcgtgttcgcgggttagtcgggttattttgtagaaattatagttttttaaattaagggacgaacgttgttggttggagtttgttggatatttttattttattttttaataaagagaatttttattttttgaggttttttggggtagtagttaaagattatacgatttaggagtatttaggatttggggttatttttttgttcgttttattggatggagtattgtttttttagtttttgggatatcgtggggtgtggttttggtgagtgaaatttggggtgttgtttgttgggaaggaaattcggaaacgtagagaggattttttggtggtgatttaggttttgttagatttgagatttttggaattttagattgtgggggtgtggatggtgaatgaatttgggtatgtttttttttattttagaattgaagaggaagtaaattatttgttatatttgaggttgtatgattatttagagaagggaggagttatttttgaatttagagtaggattgtattattaggtaaatatttgttttgagttagaaagattttggtttttgaggagattttgagagtttgagtagtgttaggaagtagttttagaatttgggggtttattatatattttagttatgtttttgcgacggtttggtggttggttatttcgtttttggggtcgtcggaaattaatgaggtttgattcgttttatttagaatttagacgggtggatagtttttcggagaatttaggaagtgattgggatagtgttttagaaattatggaagatgtggggtattttaagattaaggattcgggggtattgagggtttttagggttgttttcgaattaagtaaggaggagttttaagttgagtagttagggagtaaaagaatggatttttttaagtgggattagtttatttttagtatttaagagtttgggagattggaggttggaggggttagttttaaatttagatgggattatgtggatttaggtggtattaggagattaggggtgttttttgaagggggattgagcgtttttgggttaggagttttattggagaaatttggtaggcgtgagaagttgttgggttggttgcggggggaattaggagttttttttcggtatttggggggtttagaagagtgtttgtagatttttattaatttgattttgtattttttggagttgttggtttttgttttgttggttttgtgtttacgattattgcgggtagttttggatatattgggtttgcgtggatcgttgggtttttggttatatggtttattgttttttttggttgttttgtatgggttttatgttgttttgagtttatttattgtttattttttgtatttcgtttgtttttttggttttttgtaggttttggtgttggttgttagttttcgggagtttaatggggatgaggcggttattgattgggagagtgaggggttggagagggaaggtgaggagtagaggggagattcgggaaaggggttgtgatcgtggggtgggggtaaagggtgaagagagtgtgggttttaggagaaaagtgtgaggtatgatttaaattgtaagtatagggattttagggatggggaagaaattcgagtacgagggtgtagggtttttttttatatataggagagaatagaattatttagggtgtttgtgtttatggatagtgagggtattgtttttggatttattagttgttatttttgtttttattttttttttatttttagtttttttttttttttttatttttattttttaaaagtaaaaaaaaaaaaaagtatgatggtggtgaataaagattaaagggttttttttatttttgaaaatttttttggggtggaggagattagggtaggatagatagatttttgtagtaagagagtggttgggaaatttagggtgttttttggattttaggatttgagttatcgagggaagagtggggttgttaggtaagtggattagggggtttggatagggttttataggtgatagggagtttgtagggcggatttggtgattatgggagttagagggagtggggatagtgtaggtagtattggtaggagggttagtgtagaagggttggtagtttaggtagtgtgggggaagtattgaagtttgtagtttttatttgggggttaggggtttgtttatttagtaataaataattgtgttatattaaattttaaatatattattataaagtgagagttattgttattttgtttttattgatatcgtttagttgggagtttaggtggtagaggatttagggggaatgttgaaatgggaggagtgggaatgacgtttggagataaattttagaatgagatgaggattgaaaaattatttttattattttgagtgggagttggagttggaagtttttagtttttttttttaataatttagtttttattgtatttatttggggatttagatgaagttataggttagttattggatagtttataggtttttgtgatggggggagggaaaaagaaggatagaagggaagtttagggagaaaagtaaagttgatagtaatggggtgggggagaacgtgtttttttattttttgtgttaaaggggagtttttaaggtttttttttttttacgtatgattttttgttttttttatttagtgtaaatttagaaattttttttttgagtagtttagaatttattttgttttttttaggtgatattatagtttttagttatatttttttggtgatattatacgagttttttttattttgtaatattagaagattttgtgagttttaattttgttttatgagattttaatattttattttgatttttaggagttaataagaaggttttggagtttaggtaggaagttagggatttgaatttttttatatatttttcgggaggatgtggtgagcgatttggaagggtaaggtggggttaggttagttaaaatttttggaagtatttagttttttttgggagggtgttataggatttagagtgaggagtttttttgtttttttttgtttttttttaattttttttgttttgtatttttatttattgtagaggagaaagcgttggtaattttggtttgttttatttagtatgattttatttgggtatgagttggaaaagagtttagtttttatgttagggcggtttgttaaggtaggtgggagaagtatgagaatagagatgtagaattaaatttaagggagggtgagggttgggaagaattaatttttagttttgagatttgtgttttttttagttaggtggtagatttattttcggggtatatagagtttattttttttgtagaggtggtggtggtaaggaggaaagaatgagtattattttaattatagtgttttagttttttttttttttttttgagatagagttttattttgttgtttaggttggagtgtagtggcgttatttcggtttattgtaagttttgtttttcgggtttacgttatttttttgttttaatttcgtgagtagttgggattataggtgtttattattatgtttagttagttttttatatttttagtagagacggggttttattgtgttagttaggatggtttcgattttttgatttcgtgatttgttcgttttagttttttaaagtgttgggattataggcgtgagttattacgtttggtttgtttcggtttttatttattttattgtatttgttattgaagtttagttttttttgggttttaagttattaagtattggttaggtatatttttttttagagggtaattaatatagttattgaatttcgtgggttaagtatagtagatatattagttaagaggttagtttttggtgggtggatttttatattttgggtagagattgaatttagtgatgtttttgtttttttattatttatatgcggatggtagtacgaaggtggagttgtatcggggtagagttagtagttatattgaagataatgttgtttatagggttaaaagttgttaatttttttttggtgggagttgtttttgcgataaagtattattggtttaagtggatttttgggaattggagagataatgaagggagtaaaagagggtgggttttagtataggatgggtttaatttttttattagttaaaatagtaagatttaggggtagaggtgttggttgtttttttttttttaattggggattggatttatgataaagagttattaaatgattttttttttttgtttttttttagttaatttgggtaattattttattttttaattttgttatgtttttgtattgatggttatagtattgatatttttttttttgtttttattattataatatttatatttttttttttttttttttttttaagatggtttttagttattttaggttatttatttaagttttttagagtttttattataggttttttttaattttagtttatattttttttttatttacgtttagagttgttagttgattgtgtttagggtattggtagatggagttaaggataatattatagaagtagagtagagttgtttaaatttggtggaatatttttaggtaggagggagttggtgttttgtgtgttttaattgtttttttttttattggttgtttagtttattttgtttttagtttttttgcgttcgatttttgatttttttatttgttaatgagtaattttaattttgttttttaatttaaatttggattatttagtgtttgggattttttttttttttttcggatgtaattattttatagtatattttggtatgtttagggttttttaggagttatgaggagagttgagttgtttagggagaagtttgtggtttttgaatttgtatttgagttggttatttgttgtattgtgtagtattgaagggaagtagtttgattgggttttttatttatttatttagtaaattgttttgaattttaagttttagttgttttttaagaattagttaattttcggggatataaaaaaacgaataagatatagtttttgattttgaagaagtcgttagagggaaaattagttgtgtagataaattattgtaatataatttggtaaatgttttagaataggtatgatgtaggtgttggggtacggtggattgttttttttagtttataattagaaaaatatgtatattttggtagtgtttattgatatatttatttaatatttattattataaagaggttatgtaatttggttgttagagaggatagatgttggtgttaggtagaatgtgtttaaattttaattataggtagggtaggtagtttatgtttgtaattttagtattttgagaggttaaggtgggcggatggtttgagtttaggagtttaaaattagtttgggttatatggtaaaattttgtttttataaaaagtataaaaattagtcgatgtggtggtatacgtttgtagttttagttattagggaggttgaggagggaggattgtttgagtttgggatgtcgaggttgtaatgagttttgattgtgttattgtattttagtttgggcgatagagattttgtttttaaataaataaaatattattaatttttaattgttatgtttgtttttttatttgtaaaattggtaaattattaattttataggattaaatgaaataatgtatataaagtttttagtaaagatttgtatatggtaagtttaaagtatatatttgttataattaatagtaatgtttgtaaagtatttagtttttggtgggtaataagtttttaaataataggtagtaagaattgttaaataggttgtttttggatagtattaagtgattggagtagttaatgttgtgagagatggatttttttcgatagattatttatttatttatttatttttaagatagggttttattttgtcgtttaggtatgattttgattttttcggtttagatgattttcgagtaggaggtataggtgtacgttattacgtttagttaattttttgtagatacggagttttattatgttgttttaggttggtattaaatttttgagtttaagtagtcggtttattttagttttttaaagtgttgggattataggtatgagttattatatttagtttgataaatttatattttatggattgttataaaaaatttgtcgagggttgaggtttgcgatttagttaaaaaataaataaaatttgggtgattagtatattagagtttattaatattgttttattttggtgtaatgtttgtattttttttttttttttttgagatgggagtttcgttttgttgtttaagttggagtgtagtggcgcgattttggtttattgtaatttttatttttcgggtttaaagtaattttttgttttagttttttaagtagttgggattataggcgttcgttattacgttaggttaatttttgtatttttagtagagatggggttttattattttggttaggttggttttgaatttttgatttcgtgatttattcgttttatttttttaagtgtgagttattgcgttcggtcgaaaatttttgtaataaaaagttaaaatgtggttaggtatagtagtttatatttataattttagtattttgggaggttaagtttgtaagattaggttgggtaatatagtaagattttatttttataaaaataaaattagttaggtgtggtggtgtgtatttgtggtttttattagggaggttgaggtgggaagatcggttgggttcgggaggtagaggttatagtgagttgtgattgcgttattgtattttagtttgggcgataaagcgagatttttttttaaaaaaataagttaaaatgttaatagttttttattggggtagtaaagtataagtgttcgatttggagttttgtaggtttggatttgttaattttgatatttatgttcgtttaagtgtatttatttaaaaaatgttaaaagttcgttaaaaggttttttaaaataatatataaaattcgtagtatatgggttggtataagtgtttattaaatagttgtttattagaatttttaattaaaatataattaggatttgggtataaattacgaattttagaaaggttggatattttaatagcgatgtgtttttttggaggattcgtagtttcgcggggtcgaggtttttggtttagggtaggttaagagaagagggtacggagaggaggtaatgtttttattttcggttttcggaagtacgttggtcggtttttaaattttttacggttagggttttgtttttttgtttattcggattttatttgtttttaatttttaaattcggaagcgtttttttttttgataagtcgtgtaatttagtagtacgtttattttttttaaaacgtgttatgtttttttggttatatatcgacgaatgtgacgtttatagtttttaaaacgtttattcggtagaatcgaaatttagtttaattaagtaatcgagaataaaattgattagtgtcgtttttaaacgtttattgaaagagtaattttcggaggtatagaagaaagggcgtagcgagggtaatagggtggagaagagttttagttggttaggatagtgtcgtttgaaattattagtttgttaagatttaaatatagatgaatgtggtataattttttatttttaaagtttaaggtttatacgatcgtttatagtttttttcgaggtagtggtagagttttagttggtgattgttttttaggtatttacggtagttattttaattttttagcgtttaagcgcgcgtatagacgtgaacgtcgttagaggggggagggggtggggcgatgtttaagtgtttacgtattcgtagtgcgacgtacgtaggcgtagtacggtttttcgggcgatagcggtggcggtttttcggggtgttcggtttttttttatttaggtcggtttcggttcgattcgtttttagaaatttattgtttggggttgcggattttttcgtcgtgttttataaaagtaaagtttggggatttggggggagtcggaagtatcgtttcgagatttttaaatattatcggggaaacggaagtggtcgtcggtggtaggtttgggggagatcggaagtgacggttcgtggggaagtcgggggcggagtcgcggggtggtgggtgtgtgtgtgtgtgtgtgtgtgtgtgtgtgtgtgtttggttgtgggttagttgtgtcgttttgttggaatatcgtgggaaggtagtagacgcgggtagttagttagtaggttcgtcgtttcgtgagtgtcgtttcgggtttatagtgagttaggagggttcgatgggcgtggcgcgcgtgcgcgaaattatttttttcgtagagtgtggggcgattatcgttttcgcgttgttttaggatttttcgatttttggggcgtttgttttgtcgtgatcggtgatgatattagtttttggtttcgtgttttttttttaatttgattggttttttgtttattgtgattggcgtcgtggagttttttttatttttcgttttttagttttttaagtcgtcgattttttgttttttgtgtttttttttttgtgtttcggaattagaagggggatggggataggtgtgaatgtgtgtgtgtgtaggagaaattttttaggtattggggtagggattaatgttagggagtttttcgggtatattttggtttgggtaatagcgggttttttttttttcgtttttttttagagatttgtcggttatggagtttaatgatagtattagtatcgttgtggaggagtttgatagtttggaggtgttggtgaagattttggatttttaaattcgtatttttattgtgggggtttaggtgagatattttattagttttggaagatatttttagttttttttcgtttaggttttttagtttgagagatgagtttgattttttggttattagatttttttttttttttttttttttgagatggagttacgttttgttttttaggttggagtgtagtggcgcgatttcgatttattgaaatttttattttttgggtttaagcgatttttttattttagttttttgagtagttgggattataggcgtgtgttattatatttagttgatttttgtatttttagtagagacggggttttattatgttggttaggttggtttcgaattttttattttaggtgatgtgtttttttcggttttttaaagtgttggtattataggtatgagttatcgtatttggttttagattttttttttattgatttttttgttcgtattttagtagaacgttttttgatgttttgtgagtgaggttgattttgttttgttttttatatggatagaatttaatgtagagggaaatatagaggaaggaagaatttgtgtgttattattatgggtggattttaatttaaagggataggtatggttttggtttttgggaagggaaatagtataggaattttaagtaagtgtgttttattgatagatattggttaggtttatgttgtgtttttaaagggtagaaattagaatttataatggagataggtttttgatagattgttgagtgaaattattaatttttatggtatagtttgagttttttgagtttaaagttttggatatagttatttgtgtttttatttttgtaatatttggagataaattgtatgtggggtggtttatggttttttaaaatgtgatattatttggatataagaaagttatatatagatttgtgattagatgtatataaatattttggtattttttaagagttagtttgtagttaggaaaaatatttttttttttgtttttttttttttttttgagatggagttttgtttttgttgtttaggatggagggttggggcgtaattttagtttattgtaatttttgttttttgggtttaagtaatttttttgttttagttttttgagtatttgggattatagacgacgtttattattacgttcggttaatttttgtatttttagtagagatagggttttatcgtgttggttaggttggttttgaatttttgattttaggtgatttatttgtttcggttttttaaagtgttgggattataggtgtgagttattgtgttgggattttttttgtttttttatttttttagtttttttttagtaatttgatattagattttattttttttgttattttttaattttggaaattataggagagtttggtaaataaattggtattattttgtgtttggaaaggggttattgatgtttttagatatatatttttttggatgttagatagataatataatgtttatgtggtttttttttgttttttattcgtgttattttttttggatttataatttgagttttattaagtttatttatttaattttttgagatggagtttttttttgttatttaggttagagtgtagtgatgcgatttcggtttattgtaattttcgtttttcgaatttaagtgatttttttgttttagtttttttagtagttgggattataggcgattattatgtttggtttatttttttgtatttttggtaaaaaaggggttttattatgttggttaggttggtttcgaatttttgatttaatgtgatttgtttgttttggttttttaaagtgttgggattataggtgtgagttatcgcgttaagttaaatttattgtttgtattttgatagttgttattttagtttaagggtttgtatagtaatgattttacggttaagataaacgggtagtgattttgtggtggtttttattttttatttttataattcggttgtttgtttttgtttttttttttttttttattttttttatttttgtgtatgttttttttttttagatgaatgtaaaagagtttaaggagtatattgttgtttttgttagtattttatttgaaaaataacggtttatttattagggacgagttttgtaagatgataagaagttttaggaatatagtaagggggttggggaggtagtttagaggttggggttattgtttggagggatgaattgaggttatgggtttatttgtttatattatgttttggtgtgtgtttatttttttgtagatgttgggggaaaggttatttatttggtggaacgggtttttttttagatttattttttttttggggtattttttgggacggggtttgttttagttatttatggtgggggatttttttttggtattcgggggtttggggtttttgtttatgatcggaatgttaatagttatgttatggttggaatttttaatttttttgtaagtttatgttttataggggagggtttttgtgggtagttttggttgtggtagtattagggaattaataagatagatgtttttatttttagattgggtttagggggttttgtggtgtgttattggttttagtttttaaggagaaaaggaggtagggttttagggaatgaattggaggtgtggaggttttagtgttggttttttttagaataattttttttattttttttttagagtgacggttttgttgtggatgtttatattaatatggaataggtttcgatttaggtattgaggggttttcgagggttagggaaggggatttgggagaaggaggttgggaggtggggtggatttggttgagagatggttgggatttgatttagtaggtggtagaatttatggttttatttgtaatttattttgataaatttttttttattgtagagtgagtttcgggtacggttggtgatggtttagtatatgattagggatatatagattttattatttcggatggaggtaagtgggtaaggttggttagggtttttttttattttttttttttttttttttttagtttgggagttagggttttattggttatatttatagggtttggtttttataatttagttttttttgtagtatttatttttttgggtagaaaaagtatttttgtgaggtttttttatttttgttaatttttttggtgtttggtatttggggagtttgttttagatttagttttatggtatttttttttaattaaaggattttatttttttaatttgtggaggttgggaaattaatttgtggaggaaaggaaattataatttttattttttgttagaaatttatttataaatattatagatgttgtggtcgggtgtggtggtttttgtttgtaattttagtattttgggtcgttatggtagggggataacgtgtggttaggagttttaatttagtttggttaatatggtgaaattttgtttttattataagtataaaaattagttgggtgtggtggtacgcgtttgtaggtttggttatttagaaggttgaggtaagagaattttttgaatttgggaggcggaggttatagtgagttgagattatgttattgtattttagtttgggtaatagagcgagattttgttttaaaaaaaaaaaaaaaaattatagatgtttattatgtatttaatttgtgttagttttatgttagttgttagcgagtcggagataaaattgtagagttatgtttttagggagtttagttaggatattttttttgtttagttttttgtagagtaattttttgtagtagttttattttgtttttggtattttgatttttttttatttttagtgtcgaggagggttttaatcgtagtatagttagtcgttttcgtagttatcggttgtgatttcggagttagtagttttgagtttttaaatattagaattagttgaaagtgaagtattttttcgggagtttatggaggtagaagaagtggaggagcgtgttttagtttagaattcggagtttatttttggtttagttttagcgggtttaatatttgtttcggaaataaatgtatttaagtgagagatggagggaatttttagtgggtggggaattttaagtgaagtatggggagaaggaaatgaattatggtaagggagggaaaggattatttggaggttttagttgaagggttagtattgaggggcgaggaggggttttttcggtataggtaaatgacgttaggataggtagttgagaagaattgttgttttttttatggtaaggaaatttaaatggtattttttgagtttgatcggaatttttttttgagtttacgaaggtttgtttttttttttagaattagttttttattattgtaggtgtaggattgtggtggggagggtgggagtagtttatttttttttttttatttttttatgggtgggagtaaagaatagaagttttggttgggtgtagtggtttatgtttgtaattttagtattttgggaggtagaggcgggtagattatttgaggttaggagttcgagattagtttggttaatatggtgaaattttgtttttattaaaaaatataggtcgggtatagtggtttacgtttgtaattttagtattttgggaggtcgaggcgggtggattatgaggttaagagatcgagattattttggttaatatgatgaaatttcgtttttattaaaaatataaaaaattagttgggtatggtggcgggtatttgtagttttagttattcgggaggttgagttaggagaatggtgtgaatttaggagacggagtttgtagtgagttgaggtcgtattattgtattttagtttgggtgatagagcgagattttgttttaaaaaaaaaaaaaaaaaaaaaaaataaaaattagtcgggtgtggtggtaggtaatttaattttagttatttgggaggtagaggtaggagaatcgtttgaatttgggaggcggaggttgaagagaatagaagttttgttggtttagagaaggattgggttagggttttgggagattagggagaaagagggtatatgtggtttttgttgattgtgagggtgggaatttgaggaaggttttggtttattgttttttgggtttgtttatagttattttttttttgcggagtatgtcgaggtgttttaggagttatagcggttggagagtcgtttttagttttttttgtagcgttattacgaggttttgggtgttgttgttattacggattataataataatgtgagttttttgatggttttgttttttttttttagttttagtatttttaaaatagaataggttgaaatgtagataattttttttttttttggaaaaatattgtaatagggttaggtgtagtggtttacgtttgtaattttagtattttgggaggttaaggtgggcggattatttgagattgggagtttgagattagtttggttaatatggtgtaattttatttttattgaaaatataaatattagttggatgtagtggtgtatatttgtaattttagttatttaggaggttgaggtaggagaatcgttagaattcgggaggagggggttgtagtgagtcgagattgtattattgtattttagtttgggtgatagagcgagattgttttaaaaaataaaataaaataaaaaaatatatattgtaataaaataatttttttttaaatttgtaagtgattttgtttttttttatagagaaggtgataatttttgttgtaagtattgttttcgtatcgtattttttgtgtttttgaatgaatttagaaaatgtaaagtataggagattagtatatgatgatttattgatttatagtagtgttttaataggatgttttttatgtgaataagatataatttatttgtaaagatttggtttatatgtaaatttttaaggatataattgaaagttttggaggatatggtatttttagtaggtattattgtttttattagtgagatggattttagtttgatattttttgtttttttgtgtttggttggttgtgcgtagtacgagggtcgggaggaggattagcggttgattaatttggtaggggagagtttgcgattgttgggtaatatttttgttgtattgtttgatttgcgttgtaatttggtttgtacgtttttacgatatttgtatgtggttcggtttatgttttattatattatttttatggtgttttagtaggtagttatttttatataggtgggttagggggagtttggtttgagggagagtgaggggtgttgatagagtgatttagggtagttattgggtttgaaggaggttaggaaaggaggagattggaaatatggtgatgaaggttggagatattttagaggtttattatgaggtttttttggttaggtttttgtattttttttatatttgtttgtttatttgttttttttagattaatgtgggaattattgtgattatgataggaaatgggattcggttttttttaatttttaatgtagaggtatttttttttggttttgggtaggttttattcgtggtttcgttttttattaatgtcgagtttttagttgagggggttttttcgttaggtttagttttttcgttagttattagttattcgagggttattcggattttttattagagtgtggaattcgtggttatgatgtatatgaatatttaaggtgagaatagttgttggcgagaagagtaggattagtatgatgagggaggtttatgttgaggtgtgagggaatagggtggggaagggagaggtatatgttggtggtggtagtttggggattagagtagaagtttaagtagatagatgtggggggtgtgggggttggtttgtttttggaggtgtgtttgtgtggtgaagggagtatttttttttgtttagatggagggaaaggtaggttttttgattgggggattatgggtttgaagtatgtttgattttagaaggatatagttaggttttggttttatttattttagggttattgtttttgtttttttgtttagattttggtatatagtttggtggtgtttcgagtgtttttattggttttttgggattttttggttatggttaaattttgggtaagagtgagggtattagggtaggttgagttttgggtagagaaagggaagggttgagtgggtgggttgaaggggtttaggtttaaggttatattagattcgttttttaggttttatttttatttagttgttttttttgttttttgagtttatgtacgtcgtcgtttattagattatttattaggttatggtggtagttgttgttttcgcggtcgtaggtaatgatttggaaggggaggtttgggaggtagggtatagtttatggtggtagttggttggtaagggtttggtttttagtttttttcggtttgttttttttgttatttataggatagtaggtgttaggttttttaatagttttaattcgggtggtgattgttcggtttatttttttataggttcggtttttttattttggagggtttttagtttttgggatattggtgagtaagggtcggggagttttagtgcgtaatagtttagggagagatttttgtggtggtgtatggaagggtaggtttgaaatttttttttgttttttatttagtagggcgtcggtttgggtattaatgtttcgttggtttagatggtgagcggttttgtggggtagttttttatgtagttagtttttgtgggtgagtttttatttttttttatttagagtttaaattttttttttagtttgtttattggtattttttagttttttttatatttttttggtttttgtttttttggaatggggttgttgtagtgttttgtgtttttaggttttagtttttttttttttttttttttttttttttgagatggagttttattttgttgttaggttggagtgtagtgtataattttggtttattgtaatttttgtttttcgggtttaagtgatttttttgttttagttttttgagtagttgggattataggtgtacgttattacgtttagttaattttttatgtttttagtagagaagggggttttattatgttggttaggatggtttcgaatttttgattttgtgatttatttattttggttttttaaagtgttgggattataggtttgagttatcgtgttcggttagttttttttttttttttttaagttatagagttttgttttgttatttagattggagtgtaatggtgtaatttagtgagttaaagtttattgtaattttgaatttttgggtttaaatagtttttttattttagttttttgagtagttagtagtattagtttttggttagtaattgtttttttttttttttggtagagatggggttttgttatgtggtttagatttttgggtttaagtagtttttatgttttggttttttaaagttgttaggattatagttaagagttattatgtttagtttagttttttttttttggttttttatagtttaggggattttaggtatggttttatcgttagtttttgttattgtttttgttagtgttggtattattaatatagttattatagttggtttcgtttttggggggtttgtttagtttttatttattttttaattttttatggttgatttttagtttttttagtttttggggaatttgttagggtttgtagggttaggggttggagggtttggtgtggttttttttattattattgtggcgatgtttggtgtttttgtttttttttaaggtatgattgattttttgtaggtgagtggttggtttgttatttattttatttttttgtttttcggtttagttaggtagtggtatttttttgttattatataattattgggtaagagtttttagtgatatgttaggggaaggggttttgggaatttattgattttgaattttttattttaaagatgaagaaaatgaggtttagaaaaagaaagtatagtaattagtgttattgttttttgatagtttgtttagaggaagaggtaggtaagttgtgttgtttgattttgttaaatatttattatatttttgttttaagtagtgaagattagaatgtaattttttatttttttagattcgttggtttgtgtttttttgatgtcgtattattttcgtgtgtttttatttttattttattttttgttttttgttttttttttatttgttaggtaatatagatagtttttttattatttttattttttttatttttattatttgttttagagtagtagattatgtttttattaggttttttttttggtggcgtagggagttttggaggtttgggttttgagagtttgttatcggagttttttattttagtggtgtagggtgtgtttagttttttgttgggttttttgggggttcgggttggtagtagtgaaagtattgttgtttttatataacgttttagtggatttagtaatatttttgagtttggagttgatggggtttttggtgagtaaaaaggatgttttggtttgttttaggaaggggtagttagaggaatgtagatggttttggtttaggggtgttgttaaggtgggatgaggttgatgatttggttgtgggtgggtaggttaggtggtaaaggttattgttaatatttgtttttgttttttaggattttttggggttttgtttttttttttgtgttagaatttttttatggtggacgtagtgatgtttttttatgggtatttttagttattataacggttttagttttagttgcgattttttttttattagtattatttgggtggttaggagtttatatttagtaatattcgggtaaatgaaggttaggggttttagaattttttttttttgtatattttattttttatttttgattgtttttttgttaggtaaagttttaattgtttttatataagttttggatttgttggggtcgaggtggaagttttgggaggattgaggttttgaattaaatttgttttgttttttttatagatggtaatttatatattgattacggggttagaagagtatgtgcgggagagttttgtgagtaatttttttttatttttttttttttttgggtttggttaaggtagttgttttttttatttttagttttatgatttttgattttgggatttttgtgttattttgttttttagtttttggtgtaggtttagttaggtgtggatattattcggataaatttggaatttttttaagagtagtttaatagtattgttgcgtatgtgttgtattgtataggttaggggttggttaggcgggggtaagtggggtttgttgtatgtgtagggttgttacgtgttagtattttttttttgtattttgtttatagatagtggatttggggttcggttgttggagttgtgtaattaaggtttgtttgaatgtttggttttaaatttgtattgtttggggggatagtagatggagtttgttgttgttattaatggtcgaattgtaagtattatttagttttagatttttagttttttgttttttgaggtttttattttttgtagtttttattttttttttttaaattgatattttgtaatttggatttaatttatttttaaaggtggttgagggttttgtgttttaaatttgttttttgttttttagcgtcgtatgtttcgtggggtgaatttttttttggtgagttggttgattattatgatgggattgaggttttaggtggtattggagtatatgtttgtaggttttgatgttatttttagatacgttcgtagggttggtgattttttttaggtaagggatttgttgggcgatggggttagggtatttgagagaattggagagatttgagaggaagtatggtgttttttaattttatagttattttttgaggagttaatggaagtttagggagtagaaagagttttttttgagttttaggtattttagagagggggaggttgaggggttagataatgtggagtggagggttgggggagaaaggtttggaggttaaaaattttgaagtttggtttttttcgttatttgatatttagcgggagaatgtttttttagtttttggaataatagtagaagaggttatgtttcgaggtttattttttgtttttgaggggggttttcgggatgaataggatggagttttagttgagatagaattttgggtagttgtagtttttttagtaagtgttaggaagtaatttagtgggttatggtagttgaaagttaaggatattattattttttttttttttttttaggaatgggtttttattatttagtaggatatttagagttagcggaaggtgaaatcgtagttttttttgagtgatgtttattttagtggtatgtttgttaagagacgtaaggttggttttttttttttttaagtttttttttttatttaggttttttcgttatgtttggaattaaattatgtagagatggtgggagtttttgttatttagtttttttttttttcgtttaatgaggaaattttttttgggatttagatttgtttttggttgttgtataattatataggatttgattttagtttgtttgttagtagttttgtattagttgtttagttgtttaatttttatgtgtttagattttatttttttttaaggtgggtttttttttgtggattatttagttttgaatttcggatggtttgattttttttgtttttcgttttgaagagtacgtttaagtatatttattttagttttggttagtgttaaagagaattaggaaggtatttttgttgtaaaaattatattttggatttttaattttttttttttttattagtatggagatttagtggagtggttgatttatggaaagggtgagtcggatggtggtattggatttgacgttgattttttttttttttttaattttttgttttttagacgatgtagggtgagggtttttagttgttttttttagaggttgtgagtcgggtagttaaggtagtcggagttcggtttttgacgagtttcgagagtttgagtcgggatttggaggtattagaggtttaggagagttataggtagtaggtgttattttgaagtagaatagggatggtttagtgggaggggttgggttagggttttttttttttggatttttttagcgatgaattggttagtttggtgttattatttgtttttttttttggtatttgggaaggtttgatagtgttatttcgggttatttgatagtgtgtttggggggggaaatgttagtttttgagggatggttttgtgtgtttgttgggattatggggatttggttagcgtttttttaatttgtttattttttttttttagtttcggtttgatatataaaaacgattgtaggaagattttaattatagtttttagcgtttttttaatgtttagcgggtttttgttgatgatttttagttttttgttttatggtttttttttattaggggatcgttttttttttttttttttatagtatttaagaaataaaagtcggatttttttggttgttttttttttatattgtttttattaggtagtgtgttttttaattttgtgtgaatttttttaaattaatatttttttggaatattgttgtgttttatttagtacgttaaattgtataagttagttttgatgtttgtttttttttttttttgagatagagtattgttgttttttaggttggagtgtagtggttcgatttcgagttcggtttattataatttttatttttcgggtttaagtgatttttatttatgttttagttttttgagtagttgggattataggcgttcgttacgacgttcggttaatttttgtatttttagtagagatagggttttattatattggttaggttggtttcgaatttttgattttgtgatttattcgttttggttttttaaagtgttggaattataggcgtgggttatcgcgtttagtttgatgtttgtattttttgtgcgaaagtattttatatataaataaaaaatttgtattttgagttgggagtatattttaggtgtatattagtatagagtttttaaattatttattaaaaaaagtttttgagtagttgtagatttaagtatagtttttagtataattagtatgtagcgttattatgtgaaattttatttagtttgataatgttggaattggtttatttaatttaaagagttttttaagtgtgttttaatattgaggttttaatagagatttttttttagtttattataaagaattgaagttttatggttgtaaattttttgttagtttttttgagatgtagttgaagttttttttaaatttttttattttttattttggttagtttagtgttttattaattaagtatggtataagtttagaaaattttagttagattttttggaatatgagtttacggatatttaataggtttgttggagagtttatgtgaagatattggttgataatttagtaatgttatagatgttttattaaggttttagatatgtaaaggaagttatattgggattagtttaggtgttagttgtagattgataattagttgatttcgtttattggtataaaaaagtagatttatttagttgagtttagtttaaattttagatttataaaaatttaaagatttaatacgatggttatgtttttagttttaatagtttattggaataagtaatgaatatttttttgattgaaattatagattatttagtattatgttttaagataatgtaaataatttattttttaaattattgtagaagtttttttttttaaatttttttattatttttttttaataaatagttttagggataggggattaggggaagggggaggaggggaagtgaggttttagttttataattttttttcgtttattttttttttttttatatatttataatttatatataagtttcgggggtagggggtaagaggaatttttttagcggggtgggggtaatttaggttttttgttttttcgggatttaggtttttttgttcgtcgggagggtttttttcgaggtggtagttttgttcgtttttaaggtttaggtatttagcgtagggtatttggtggggaggtttaggggataggtatgtgttaaatagtgagttatagtgagaggttagcgatgagatggaaggataggaaattaggtggtaattcgaatttagagttggggttataagggttttttttttatttgttggtaaaggtcgacgcgttgggtgcggaagattttattgtaggtggaaggcgtggttttgagacgggaattgaggttagagaaggatttaagggaagaagggcgtttaaggtaagtttaggatttagattttggttttaaagtaaggaagtatttggaaagtttatatttttatttcgttttattttttagttgggggagttcgtgatgatttaggttttttaaggttgttgtttagtttttgataattttggaacggttttagttttattggatgtagttgaggggaaaaaaattatgagttgtttattttgaaatatagaatttttatttttaagttttggcgttttttagttttttagtttttgtattttatttttgttcgttttaagttagcggggaagggtttggtaggtgaaggtagtattcgagtagtaggagtaggtgggggtcgtatagttaggttggggggttgtagagtagggtttataggtaatagagaaaggggaggtggggtaggaggtggtgttggcggtagggagttaaagtttattataggtagttgtgagtttattatgggtagaagtatttgtaataagaaatttgggtgtgtatgttgggggtagggaggaatgttagaaaattagggaaaattaaagttagtaattggatagagaaattaaatgaaggggaagtgtgaagatataatatatttgttgggtaggagtttttgaagggagaaagttattttggttattaggttgtagaggagtagaataaaaattcgaaggggatggtagattttggcgtatttgtcgggaaatagggagaaatatattaatttttataaaattattttttttattttattttttaatatttaatatttgttttttttttatttgaagtaacgatgtgttaggtaaaggattggggtagaaagtcggagagtagaggaaggaaggtggagggtagagaatttttttagtcggtaatttttttagttttgtagtttgtattgtggagaaatttagaaattggtttttgagagttattttagagagtagtgttgagggaggggttgggtcggggggtaggtataggggttgtgatttgaaaataaattgtggggagaaaagttgttaggaagttagagttttagtaatgttttaagtttattagtttttagtattttagaattgtgtttttttttttttttttttcgaaatatatttttaagtatttttgtgatttataggtatcgagttttatttgtaagggtgtagtgagggtgttttagggcggaagtttttattgtttggatgtaattgagagtttatggtttttttagagatttgtaggagaggagtacggttgaaatagttttagtatttgtggttaagaaaaaagattattattttatttatagaagtaaaaagtagggagaaaaatgatgtgataaagtggtattttataattttgtaacgtagaaaggtttgattataaatatatattaggtagaaaaaaattattatttattgaaggggttatgtaatgggaagcggggtttatttgagaattggaaggtttagtattgttatagaaaattttaggatataggcgttggtttgaggagttgggtttcgggatatagtgtttagaatttaggtttttggattgtggtttagtagaggtagtagtattgggaagtagtttttagtttcgtgatataggaatggtttgggaaggagaggtttcgtggagagggatgtttggtattttggacgttttggttatttttagtaattttttttagaaattttgggtttttttattaaatttttatttttatttattttagtgattgatgttgttagttttttttttgtttttaagttgttttttattattaggcgtaagtttgagttttgtgattataagaaggtaggagatattgtttcgtgatagatatgtgttttttatgttttatttttagttttttttttttttttatttaatttaggatatttagatttagtttatatagattttgttattagtgttaaattggattgggggattaggtcgatgggatggtcgaatggggttaggttttgtgtttcggtttgtatgttgtgatcgttttgtgttaatggggttagggggtagaggttgttttcggggtagtttttggattgggtatatagtaaagtgtattgggggagggaaagggaaatttaaattggaatgtttagaatatatacgtagagagaaaaagtagaaaaaggtagggttaaagttagatttttggaaatattttttttatttttttttggttttttatttttttgtttttatcgtggggggtaggtggtggttttttaggaggtttagagttaggtggatttttataaggaatagtatttaggggtgaggagtttttaggttttttggggggtttttttgttgtttttttgagttttttattaggggaatttcgttggttgtagggatttgatgatatttgagaatttttatttaggtttattttattgttagattgatttatttgagaggagtggagaaggagttagttaagttagggtagaaagtattttaatatttgattgatgtatatatataaattgtagaaaggggatagttaagtgagagaatagttttagatttaatttagagtaggtggggggtatgattagtgtttaaaaaagttttagtttagatatatttttttatttttatttatttttgtgttagttatatttttaaaaggatttaggggttttatttaaggttttatggagttgggtcggtaattttttcggttagtggttggagaagggagtattaattagaagagaagtgaggagatgatagtttagaagttttttttatttttaatttttttattatagtttttttatttagttttatttattagtatgtaaacggttttagatgtgaggggttagggtttttgtgtttgtatttttggattttgtttgagggtttgggtttttaggtttagagtttaagaatttagagttatgaggaggtggtaaagatttttatagatgagaagggttagaagtaaaatatgaattgggtgggaattgggaattataggaagttaggatagagtggggtgatatagggtgtggggataataagggagatatatgggagattaatattgagaattttggagtaaaaatatagtgaaagaaataggaaagaaaatagagaaaatataatttagaagaatttttacgagtaagagtgtagtgaagtataattttaaatttattttttattttttgtagtagttttggttttttgggaggtcgttttcgacgtttagggggaaagggattaatttcggtagagtttcgaggagttttatttattttttttattattggtttcggttttttaaagtgggggtttgggaaagagaaaaagggttagtatttgtttggttttgttattgattttaattttttttttttattttattttttaatttttttatttttgttttttgtagaaacgtatttagtagtagggtttttaggttaggttttttattcgttttttttagtatttgattttttttggggatggagatatttttatttataatttttttagtttattagaattgaggtcgttgttgattttttggggttcgtatcgggttgggggtttaggagaggggttttgaggggtttggggaggtttaggtttgtgttttggatgattttttggtgtagttatatttttttgacggttattaagttgggttagagtttgttggatgttagtagggttgttgtggataatttggtttaggcggaagatagtagaattgttgggaggtgggggaggtaggggaagtttcgggggacgtttttttggaggacgattggagaaaatagagtattagttttagtatttattaaatcgttatttttttttataagttatgttttttaatttttgtttataatttatttttttttttattaaagtttaggtgtttttgagtttttttaagggtttttatgcgtatagatgtatagattggaaagtaaagaattagtaatgaatatataggtgggtgtttttgattttaatattttattaatcgttttttagttgttttagttagatatggaaattttattgatattttagagtttatggttttttaggttataatttttattttatttaaatttattttttttttaggtttttttttttttttttaatttttaaattataataaatttgtttgtttttatttattttcggtttttgggagagggttagttttttttgtcgtttcgttttggttcggttttttttttaggatttttatcgttttttttattgttgttgttattgttgttagttttgttttttgggttagggcgtcgattttgtcgttttatgtttggtcgttgatttgagaagtttcgtttatttaaatttttggttttttggtttagattttcgcgggatatggttgaaatatttggtacggttttatttttattttttttaggagtttttatagttttgggtgttagtagtattggtgggggtgtttttttgttttttcggcgtttattggtgaagttattgttttttgatgtagttttttattttttattggtttggtttgagttttggtttgatagattaggagatttggtagttgttcggcgaggtgttggggttattgtgattgttgtgagggtttttttaggtgtaggagcggaggttggaagggttagggagggtttgtttttagatttttttgcggtattttttcgtttttgttttagttttcggaaacgaggcggtttattttgttgttgagtttttttatgtcgtttttttcggggtcgttttttattttttatgtttatattgttatttttattgttgttttcgcgcgttataggggatagaggttttgggattaattttttttttaaaggttttttatttggtggtaaagggtttgtgggaggttttttgggagttagagatttggttggagggttttagtttgggtaaatttgaggagggggtttttttttttttcggtttcggcgagatggtatttttttgggagtgaagattcgtttatttcgggtagtgaagcgggttggggttggtgaaggtggggtttttggtggtgggggagcgagagggatttgggtgagtgttttttttttgggtgtgggagtttttttgtttgaaggagttagattatttttatgggtttcgttgtttgtttttgagtttcgttgtcggcgtcgtttggggatttttttatattttgaattttcgtttcgtgtttcgttggtagtgcggtttcggggagtaggagggtggtttggtttttttgttttatttttacgtttattattttttcgaaattttcggtaattgcggaattttcggtttcgggtttttcgttttcgttttttataggtttttcgaaaatttttttttttggtaaaatattcgtttcggtttcgatttcggtaagaggtaggatttatttttttatacgaatagttttttcgaagttttggggtaggggaaagatttttattgggtggggtttttttggggttttttagtttttttttggttattttgagtgggtttggttttgggggtttgggggttttatttttttgttcgaggggtttgggaggtagtttttttatttttgtaggtggtggaggtttttttataggtttagttcggcggggtggggtttttggtttttttggagggattttacgacgattgttttttggacgagggttttagcgggtttttgtgcgattttttttgcgtggtggtggggggttttggtttttattttcgatttcgcgggtaggttttcggtttgtttttggtttcgttagttgtgtagttttttttttagggggtttttttttgggtggtggagtttgtattttggttattttattattgtttgggggttaggggagtggacggggttttggtttttttagaggaaagcgagagattgggggtttaggggttttatttttaggaaagtttggataattggttagatagggtggtgggggaggtattggaggagtttcgtttttgaagagatagatagaaagaatggaaataagtattttaggaaaattagaattaggtgggaaaagaatattttattatgatgtagatttttttttattatttttttgtttgttttggtagagatggtatttagttgtcgaggttagtttcgaattgttgggtttaagtaatttttttgttttagttttttaaaatgttgggattataggtatgagttattttatttagttttttttttttcgtttatttttatttttattattaatttaaagtattttttttttaggtttagatttttttattgtgaatttatttattttttatgattaagatttattttatttttttgttatttttattcgtagtttggcgtagaggtgaggtaagtgggcggggtttagcgggtgtggcggtgaagatattttttatttaggttaattttggatttatcggtggagtgtttcgttttcgtaatatagtaggtgtatgacggttaaatggttttgagtttgagtttttattgtttgaacgttttcggggaattaggtttgaagaaattaaagaaaaagaaaaataattttatttatgttataagttttttagtttaaaaagtatttttttttgcggttaagttagtttttttattttttgtttttagtaggttcgggttttgtttgtttttatataataaggttatttatttagattttttataagagaattaatttattttaaataaattttggtaaatgaaggattattgttttttttatttatttatttatttttgagatggagttgtgttatttatttatttatttttgagacggagtttcgttcgttgtttaagttggagtgcgatggtataatttcggtttattataatttttattttttgggtttaagcgttttttttgttttagtttttcgagtagttgggattataggcgagcgttattacgtcggttatttttttgtatttttagtagaaatggggttttattacgttagttatggtggtttcgaatttttgaatttagttgatttgtttatttcggtttttttaagtgttgggattataggcgtgagttataatgtttggttaattattgtttattttttaattaagtttatttttgtaatagagttattttagtagtgttaagtatatgttttttttttattattatgatgggtaaaatttattatattagagttatagtaagattttaatatttaatgtttaagattgaggggatttttttgttttttattttttttatgtttttttattagagggatgtatattaggagggtagaagtttagagggggacgattttggaggagtcgggggtttatataaggaggaattattatttatcggggattaaagtttattgggggtatgggtgggggtcggtttagagtatttgggtatagggttttggggggcgggggtggagtttgtggagttggtatagtttttagggttataggttgtggtggtgatgggggtattggggtaggaggggtagagttttgttgatgttgttgttattggtgttgttgttgttgttttaggagttgtttttaggaaaggaggaaagataagatgagagaggtttaaagtatatatggataaaggaattagtaaagaaaaaatttggattaggggaaattggcgtgataatggagataattggataaagaagtaaagggatttagaaggtaatttatgaagagaattagggatcgaagttaggaagaaaagtagtttttagagggtaaataatttgattttatttgttgttgtcgttggaaacgaggaggtaacgatttttgatatttggggtagtttaagttttgattagggggttggcgggtgggattaattttattatttttgggttttatttttggaattgggggtgtggtaggaggaggaattttttttggtggtttaggatttttttttgagggtagttgtggttttattgtatcggaaaaaatataatagagtgatttagtttaataatagatattttatgaatattttaggaattttacgttttatttttagtttttttaagattaaaatattttatttaatatttattttattgaagttttttttatttaagatttattaaagtattttatggttttttatgagtttatggtggtggtattaattttttatgaaattattagaataatagtattttttttagttttggtttataggaaatagtttttatttttatttatgtattttttgtgagataggatttttttttgagatagagttttgttttgttatttaggttggagtgtaatggtatggttttggtttatagaaatttttgtttttcgggttaaagcgattttattattttagttttttaagtagttgggattataagtatatgttattatatttggttaatttttgtatttttagtagagacgggttttattatgttggttaggttgattttgaatttttgattttatgttttgttcgtttcggttttttagagtgttgggattataagtgtgagttattatgtttggtcgatagggttttgttttgttgtttaggttggttttaaattttttaggtttaagcgattttttattttaagtttttttaagtgttgggattataggcgtgagttatagtattttgttaagaaatggtattagattataatttaagattttagataaaatttttttttttttagatatataaatgatagaatattattattgatagtttaataaattaaaataattgttttttattttatttatttttagttttattattttgtatttttaagtattttgaagtagtgatttgatatttggtagtatttatttttatttttatatttgggttggtttcgaagttgttattgttggtgttattggtattgttattattatttattagagtgggagtcgtagttatatttggagtaggagtagattgggtaggaggggtttgtgttggttttttaggttttttttttggtgttggggttgatgttggaggtggagttggaggtgtagggagttttttagggattgtaggtggtggagttggggtagaaggggtagtaggtggggtagtaggttttgttttgagtcgtttgttaggtgttttaaattttttatcgagtcgtttgagttttttagtataggttgttcggcgttttttttgtatgcgtcgtttttttttttttcgtcgtcgtcgggttcgttttattgttagggaaattttagatgacgattgttttcgtcgttgtcgttatgttttatttttatttttaggtgttgggggtttgtagggaggatttttacgattttgttaattggtaagatttagtagggttaggggaattagttattatgttttttattattttttttataataaattaattgtcgttatttgtaggatgtaacgatttaggttttggggttgatttttttgggtggtgataaatttattattttggttttttttgagattacgttttgttatgttgtttaggttggttttgaatttgggtttaagtgatttttttgttttagtttgttgagtagtttggattattgatgtatattaatagatttagttatttagttattttagtttttttatttttttgtttttttttttttttcgaaatttaaatatttagggttttttttttttttttttttattagtattttagttttttattttttatttagatttttttattattaaagatatttaaaagttttttaggatgttttgtagtttggtattttatatagtttatttttagtatttttttttttttatattataatcgttttaattatttagttgatattaattttttatagttgatttttttaattttttattggagatatttattgggtagtttttaggggggttttagttttcggcggggtttcggtgaggtgggggtaggggaggttttggggtaggaggtttcggttttgtttttggaggtcgagaggtttttgtttaggtcgttttaggagtgggcggttcgttgttgggggagttgttttttttgttatttgttttagggggtcgttttttattagaagttgattgggaatttttgttgtgagtagattaatagtgaaattaaaattagttgtaattaatatatttttttaagagtatattattaaaatataaattaagatttttttttttttttttttgatggttttaatttattggtttttagttttttttttattagagtttcgtttattttttttatcgttgaatttgagttttttagtgtagttaatttttttatgggtttttgaggggaaatatgagtattagtaatttaagtattttgttttttaattttgggaggtagtttggaattatgtaataagatggattattaatgttaatattttttttttcgaagtttagatttattaatgaagttttgttatttttattttttttattattttgtaaggatttggtattttttatttatttttttttatttttttttttttttttttttaaaagtttcgttttgttgtttaggatggagtttagtggtacgattatagtttattgtgatttttaatttttgggtttaattgatttttttattataatttttagagtagttgggattatagatgtatagtttatatttaattaaaaaatttttttttttttgtagaggtggggggttttgttgtgttgtttaggttggttttgaatttttggttttaagcgatttttttatttaatatttttaaagtattgggattatagatgtgagttattgggtttggtttttttatattttaatgtttgttttttatttatataattttgtatttttttttttttattaggttttgttttttaagatttaaatttttgatttttaatatttatttatttgtttaattattattatttttttgatttaattgattaaattttttgagattattttttttgagaatagagggacgatttataggttttattaagcgtattggtggttttgagtttcgggggttcgttatacggggaaaacggttgtatataaaaaagaaaatgaaatatggtatgttgtataattatatgcgagattgattttagattgagttttttggttagaaaattatttttttttttaataagttttttttgtttttagttataaatttagatttggattgtttatttgggtttattaggagtggggtatcggtaaggtttttggggtttatagggcggagggaacgggagatatgggggatatatttgtaaaagggtttaatagtagttgtttagagggatagttatatatttttttagttttttaagtttgttattaattatttttttatttttttttttattttataggttaaagattaagttttgatttttagttttttagtttttagtgtaatcgttttaagataagatattaagatttacgaaaggcggtattatttcgcggtagggagggaattggggtgggtttgaaggttgtagtttatttcggggattatgattatgatgaagtttggagttcgggttttttagtttattagggttacgtttattttcgtttttttaagttgtagaatttgtattttggaaaaggtagagagaggtattaatgattggaggataagtgaatatagttgaaagtgatggggaggaaggtgaataagttagtatttagttttgagatgtaataggtaatgttttggttaaaaggtagttatttattttgggggcggaggtttggttcgggtttagacgattgttcggtagattttttttttttggtagttttgttttggtcgttagtcgtttgtagggtcggaaatttttttcgagagaatcgtgatagtaggtttgatgtttttttatttattaggatggggatgtagaataggagatagaagatattttttgaggatatgttataaaagtggaagattttggttgggcgcggtggtttacgtttgtaattttagtattttgggaggttgaggcgggcggattacgaggttaagagatcgagattattttggttaatatgtgaaattttatttttattaaaaatatataaaaaattagttgggtgtgttggcgtgtgtttgtagtttcgttattttggaggttgaggtaggaaaatcgtttgaatttaggaggtagaggttgtagtgagtcgagattgcgttattgtattttagtttgggtgatagaatgagatttcgttttaaaaaaaaaaaaagtggaaggttttgataggtattagattattaggtttttcgtttttaaatttatttttttatagaataattgtttattttttaaggaggttagttttggtattattatattttattatataagattgagatttaaatttgtttatgtgtttttatgaaattgaatatgggtggtttttgatttagttaaagaggattaaggttatttggttgaaaatatagtgtagggtttatgtattttatggtgtttagatatagttttttaattaagtgttgtatttattatttttatgtgttttatgggtgacgttggtttgtgtttaggattttatttcgtttggaattaaaggagtgttttggggaagtgtttagaaagatgataaatgatgtgggtggggtagttatgaattattttttttttttatttttttagttttttaggtatttcgggggttgttgggggtcgtttcggttggttggaggtaggcgtttgtgaagtcggtagtggttgcgatttcggcggttgagcggttgaggtatcggaattgaggggatagaatgggaaggttatttatatttgagatgtttttttgatttttttaattggtggagatttaggattgaaattatgtttattgttattatttataaatataaggataaattaattttgttattttttgtaggttgttgtttatttttttatgttttttttttaagataaaaagttaaagtttagtattattttttagttatttaataaggaatttgtaataggtaagaaagggattttttcgtttttggtttagacgtggttggattaaattaagttttaatgttttttgaagtttaagttaaaatatttattattttaggttttttaagtttttgtttattttttggggtcggattgtttttgtttgtttgtttattttgtttcgttttttggtattagtgagatattggggttattgtttttgttttcggtttttaggtttggaaggttggttggaggtggtatacgtcgggtaatggtaattttttcgagattttgtaggttatggcgaggggtaattggagaataagacggagagagggtcgaaaatgttttatgtgggagatttgatggttttttattttgggatatatttatatatgttgaatattttattatttattttttttaaattttttttagaagggatttttttttttgtttttaataatttttgaaatcgcgttgattgtggtggtttatattttgtaattttagtattttggtaggtcgaggtaggcggattatttgaggttaggagtttaagattagtttgattaaaatggagaaattttgtttttattaaaaatataaaattagtcgggtgtggtggcgtatgtttgtaattttagttatttaggaggttgaggtaggataatcgtttaaatttaggaggtggaggttgtggtaagttaagattatattattgtattttagtttgggtaataggagttaaatttggttttaaaaaaaaaaaaaaaaaaaaaaaaaatttatgaaatttttattaagaaggttgagatatgtaatatttaatatttttatgtgagattggttgattatgagtttgtaagaagtaagttggttttaaagttttttaaatttatatttatttttttttaatttttacgtgtttaaagatagggaattatagatacgtttttgtaggaggataattggtgtttatttagagtttatattttttttaaaggatttagtgtaaagttgggaaattttttttagttttttggtatttttattatagttatttttttttaaagagttttaaaacgtatgttttatgtatgtttagtttttaattattagaagtatttttgtaggatttttattagcgggtttttggatttttaaggatttgtttttatacgtattaaataggttgagcgaggaatatttttttttatttttttttttggtagtcggtttcgagcgatcggatattgcgttggaagtttattgagtatgttgggttttgtaggtattttttttaaaacgtgttagagtttgtgggttagatagtaagtgttttagtttttgttttttgtatagattataatagaaatttaaaaattttattgtattattattagggatttagatatgaggttttttggtgtttttttttttagtttatgtaaattgtttattttttttaagtaattatgatttatttagtttttttatagtttaaatgttatgttttttttttttttttagatatttttgttaaggaaatttaagtaaaaatttagtatttttttagtataaatattttgttttttgtgtttgtttataaagagtaattttttataagtaataattttttttttttttattaaaatcgttttagagatttataataggataaatttaagtaagagaaaattaaaaaagaagtatataattttattagagaagaagaaataatattttagattttttgtttattggatataagttttttaattatgtttttagggttttgtattttaggtttttagtttagtagtttcgtgtttatttgggaaggtttgtaggaaggtatgttgggagtttaaggattttatgagtttgtttagtcggaatgggggttggtattagagaaatttttatagaataattagggttgtatatatttttaggttataggaattttaagtatttgaaatattttatttttttttaaatttgtttttgtattggtttttggaaaaaatcgtttttagatgaaatattgttttattatatgaagaattgagaaaaagtattatggagttattttagtattttgtaattatgggttagaaaatagagggttaaggttagagttattttcgtttttttatttttattaaaaatgtttattattagtgtttttttattcgatatttttagttttttaagtaagtcggacgataggttttttagtttattttagagtgattaggtattcgtttatggacgggaatagtgtaaagagatgagaaatagtggggaagaaagtagggaaatttagataggtttagaatgaaagttaaaattggggagaaagaattttatgataagttagagataagatggatgttgtttcgtaggtgtttgaggaggttaatttgtgaagataaatatatgaagggaaaacgaatataagagttatgtagcgaatagattaaaattaatagaaaataatgaatacgaaagtaggtggaaaatatatggaaataggaatggtaaaaaaaaaaaggatgtagataacgaagtaagggggtagaggtttaagaagaaaaacggggttgggggagaaaggagacgaggaataggaaaaatgaaaaagtagatatagggcgattgagtaatatagaaagtaaagatgttgggataaaagtaggattttagagtgggagtggttcgatacgaagaggggcgtttagaggggggaatatagcgttggatgataggagggggtttaatatggaggaaaagcgttttttcgagagaatcgtcgggcgcggtttattattacggggcggtagtcggggagggggtttataaatgggggtgaaaagttaggagcgtagcggagggtagggagttacggatttaggcgtaggggttattttttgaagttaagacggtgggtggttaggggtagattacggattttgaatgaattgtcggaggtgcgggtttcggagtagaggtatcggagggggaggggtaagtaggttcggtagtaggaggataaaatggcggcggttaatggtagtttttttttttttcggtttattatcgtcgtcgtcgtcgttatcgttatcgttattatttttttcgcgtcggaaaagggcgttagcgtacggtttatttagatttatttggtcgggtgcgcggggattcgggattcgggtttaggggtttttcgggacgggatggcggtggggcgggggaggatggcggcggatggcgtcgggttcggtttttttcgtttttttcgtttatttcgcggttgagtttcgattaacggtttattcgggtaatcgtcgttttcgggagtatttttttttattttttattttttttcgcgtttagatacgttttttaatttgtataaagggcggggtattttttattttaattttttatttttagggttgtttttagtttaaaaaaaaaaaaaaaagggtcgggcgcgcggagtatgcggaggttatttgtataaagaggagggatttaagggtattaggatttcgattggttaaggaggcgggtttttagcgtcggtcgttgagtcgtgttgagggggcgggaatgcggtgtaggtcggttgggcggttgggacgtagaatttatacgacgaatgtgggagaaagaggcggagcgtgcgtcggacgttagtagaaagatgggagcggagagacgttgggacgttaaaagtggaaggtaacgatatacggttcgtggcgtttttagttagggagaaagagagagaggacgggggttggcgggcgggattagttgtcggagggttgagttttcgtaggtttggtaagagttttagttttcgtatttttttgtcgtgagtttgaggaggtggttggagcggggaaatgtattagaggggcggggttttttagttattatattacgttatgtaaatgaggtggttagatagattaatttaaaggtttcgggaagcgtttcgttcgtattacgtagcgtaggtatttttcgggtagttttatttatttgtataatgtatgtaaattatttgaataaagataggttaggaatgattcgtttattaaaatatgggtaattatcgattaagacggatatttaattttataatttataatttttatgaataaatttttatatttgaaattattgggaatttgtaattttttaataatgggttttattttgtgaaatgtagtattgttatttttttttgttttttattattcgattttagaattttttgtttttattagagttatatttatttaatagattatttaatgattatgatttgaaggcgttggagataatgtataggatattatagaagtagagaaataaggtttggcgcggtggtttacgtttgtaattttagtattttgggaggtttaggtaggtggattacgagattaggagtttaagattagtttggttaatatgatgaaattttatttttattaaaaatataaaaatttgttttacgtggtggcgggcgtttgtaattttaattattcgggaagttgaggtagagaattttttgaattagggaggcggaggttgtattttagtttgggtgatagagtaagattacgttttaaaaaaaaaaaaaaaaaaaaaaaaaaggatgggcgcggtggtttacgtttgtaattttagtattttgggaggtttaggcgggcggattatttgaggttacgagttcgagattagtttgattaatatggagaaatttcgtttttattaaaaatataattatttaggcgtggtggcgtatgtttatgattttagttattcgggaggttgagtcgggagaatcgtttgaatttgggaggcggaggttgtggtgagttaagatcgtgttattgtattttagtttgggtaataagagcgaaattttattttaaaaaaaaaaaaaaaagaagtagagaaataaaatatgattatgtttggggtgattgagaaatgtttttagaaaaatttttattaagagatatgaggtcgggcgtggtggtttatgtttgtagttttggtattttgggaggttgaggcgggtagattataaggttaagaaatggagattattttggttaatatggtaaaatttcgtttttattaaaaatataaaaattagttggattggtggcgcgtgtttgtagttttagttatttgggaggttgaggtaggagaatcgtttgaatttgggagacggaggttgtagtgagttgagattacgttattgtattttagtttagcgatagagtgagattacgttttaaaaaaaaaaaaaaaagaaaaagaagaaaaaaagggtcgggagcgggagtagtggtttacgtttgtaattttagtattttgagaggttaaggtgggtgggttatttgaggttaggagttggagattagtttggttaatatgagattttattttaggaaaaaaaaaaaaaaatgatatgaagaatgatcggagtagatatttgttaaaaatatataaataaatagatatgaagaacgagttagaatttatttaagttttagaagaaggtgtatattttaggtgtagagaatagattagtggaggtatgagtttgggggtttgtgtttaggttgatatggttaaataaaggaggcggtttatttattatgaaaagtgaaggtagaaaagtttgtagaaattagatgagaattttagttagaggtttagtaagatttaagatgatttttgtttttaaatttttaaaatgatttttttttttttttttttcggtcggttattatatatatcgttttgttattttttgtagtaaaatttttaaaagggatgtttatagttattgtttttaatgagtttttttttttagttttttttttttttttttttttttttttgagatagagttttatttttgttatttaggttggagtgttatggcgtgatttcggtttatcgtaatttttatttttcgggtttaagcgatttttttgttttagtttttcgagtagttgggattataggtatttgttattatgtttagttaattttttgtattttagtagagatggggttttattacgttggttaggttggtttttaatttttgattttaggtaatttgttcgtttcggttttttgaagtgttgggattataggcgtgagttattacgtttagttgtaaattttttgttttatttaatagtattagtttttttatttatttatttatttaagtgttttttgtttgtttgtatgttcggtttttttttttttgagacggagttcgttttttagttgtttaggttggagtgtaatgatgcgatttcggattattataatttttattttttgggtttaagagatttttttgttttagttttttaagtagttgggattataggtatgcgttattatattaggttaattttgtatttttagtagagacggggtttttttatgttcgttaggttggtttcgaatttttgattttaggtgatttgtttattttatttttttaaagtgttgggattataggtataagttatcggtttcggtttatttaagttttaaatattattgagggtttatgatatgttaggtataatagtataggttattttatttttatttttagaaaaaagttttatagaggttgagtgatttgttaaagtgataaagtttatagtggtggagaatgttggtttatggtattttttgttttttatgaaatttgttatgggtttgagtattttgtttggatatgtgtttttgttttgtttgtattttttgaggttaaggttgttttatatagttggaattttttttggtgcgtgaaattatttgttgtagtggatatattatagcgttgttgatggattgtttatatggttaaatttttgttattttttttttaagatttgttttttttttttaaatttaggaaaaaaattatttaaataaaaattaagttgatttgatttggaggagggggtaatttatttaatttgttgattttggtttataattttgttttttgtttttatatttgggttattagaagtttttttaattttattattttttttttttttaaattagggtaatttagagatagtttttttggttggggggtttgttggtttttttttttttttcgttttttttttatatattaggattttggttgagatgggaagaggtatagggattagggaatattttttttaagggaataaattatagggtgttaggaaaggttagaaggggatggggatgtgagggtggaagggggaagaggaagggtaggggttggagtttttggggattaggattatggatagggatggggtcgggattttggaagggtttttttaaggatggaagaagggatgatgggtaacgtgtagaaatgttgagtttgtggataagggtagggatgggggaggagaaaataggtaagtataggggaggttggaaattgatatttatatttttaggatggtagattttttgtttagtattattttgagaaagttagggtagttgaacgttttttcggagttattggatatttttttaattaatttttttagttttaggtgagttttggggattttaagtttttttagtattcgttttagggatatgatatttgggggtagaggatggggatggggagaaggtggggagattttttttttttttttttattttcgtatttttattttttttttttttattgtggtaggtgggtttttttttaaattatgaggaatggagtatgtaggagagatttttgtttttttaggtttgtatattattttgttttcgtaaattattcgttttttattaatatcgttatttttattaaggttaaattttatgtatttttttgggtgaggggagagagtagaagggataagcgttgattggagggtttttagtaggggattgaggaaggggttgttaattaattgttaggtggaggagataacgtggaaggaggaggaggggtaggtagaggaagtggggttggggagttgaggggtttcgttagggtgtaaggagttagaggggatgttgagagaggtaggttcgggaaagggatcgtagtgtggtaggagggtaataaaggtaggttttttttttgttattataaaagtaaattttttatttttgttgtttttgttttgtttttgtggaaattttaatttttttatttttagttttgtttttatcgtttatagttttttttttatttttgaagttttttagtttggagggtagatttttattattgttatatttgggatcgtttaggaattgttatggaggggaaaataagagttagggtaggttttttttatttacgttttatttttttggttttgtttttttagtttttttttttattttgttgattttatttagtttttttttttgttgggtttttagtagtttgaaagtttttttttttgtggggtgaaaaaaattaattagtttttatttttttttttttttttttattttgatattagttcgggttattttaggttagttgattgtttttttagtttatagtttaggtttgtttattttattttttcgatttaatgtcgttgtttattttattttttttattttgtaaatttttggtttggtttatagtttagtagatgttggtagaggtggggagatagattaagttggaggtttttgtttgtaggtttttttttttttttattagtttttttagaagttttttttttaaattttttttttttttttattttttttttttttgttttttagattttatttttttattaggttttgttgatattagtattttaggaaggagggggagtttggtgtgaaatgtagattagaaaataatatttttttaaattttttttaaatgagagtttagtgtgcgtatgaaataaatattttgataagttattggaggtgtgtaggaagggtaggaagatattagggatatttatttttaggaattagtatttttgaataggtttaaggtttaggtaatgataagattttgtattttgttaggttttatgagtttgggtaggtagttgtggataggaagataaggaagggttggttgaatttttttgttttgtagatcggagaagaatttgaagtttgttggtagttttaggagggtgataagatgggtatagggtttagaaagggagagaaattttatttttagtttggtagttttaaggaggtttttaaaaatatggaaatgtttaataaaatattttaatttgtttgttttagaatgtgtaacgtaatttttttattttattttttttgaaatttttagtaaaatttatagagattaggaatttaagagtttaagtagattttttggaggaattgaaagtggtatttaaagaaatagcgtttgtggatagaagagttagggagtgaggttgatattaggtttgtatattgcgcgtgcgtgtatatatgtaggtatgtttgtgtgatggtggtgttggttattgtgggtttaatagagtggatgatagtttttgatatatgtttttttaggtataatttttattttttttgttattttgtttggttagtcgttttttggagaggtgaggatagtatattttttttattgagattttttggtttaaattttttgtttagggttttatttattttgtttcggtattgatgaagatattttttttttttttttttttttaatatatttttttttttgtagttgggagtttttattttttattgttttttttttgatttaagttaggtaggggagatgttggagtggtttttggttgttgttgttgtttttttttttttttttgagtcggagttttgttttgtcgtttaggcgggagtgtaatggtgtaatttcggtttattgtaattattgttttttgggtttaagtaatttttttattttagttttttgagtagttgggattataggcgtttattattacgtttagttaatttttgtatttttagtatagatggggtttcgttatgttggttaggatggtttttattttttgattttgtgatttatttattttagttttttaaagtgttgggattataggtatgagttattgtatttggttggattttggttttttgatttttttttattgtagttatatttttttgttgtagagagagttgtaattttgtatttttaatgtttttagtgtttgttgggaggaatttatttttttatttatacgtttatttaatagatatttattgaatgtttattatatgttagatatgtttttaggtttagagaatttaataaatgaaaatttttgtttttatggttgatttaattggggaaggtagataatataaataaataagtatattaaaggtgttaggtggttaggcgtagtggtttacgtttgtaattatagtattttgggaggttggggtaggcggattataaggttaggagttggagattagtttgattaatatggtgaaattttatttttattaaaaatataaaaattagtagggtttggtggtgcgtgtttgtaattttagttgtttaggaggttgacgtaggcgaatcgtttaaattcgggaggtagaggttgtagtgagttgagatcgcgttattgtattttagtttgggtaatagagtgagatttcgttttaaaaaaaaaaaaaaaaaaaaaaaaaaggcgttaggtgtttatggaggaaaataaagtagggaagaggggatataggagtattattgttaatggtttttagttttttgttttttgttttttgttttttttttaaacggagttttattttgtcgtttaggttagagtgtaatggtttgattttagtttattgtaattttcgttttttgggtttaagcgatttttttgttttagtttttcgagtagttgggattatagttatttgttattatatttagttaatttttgtatttttgtagaggcggggttttattatgttgattaggttggttttgaatttttgattttaggtgatttatttatttcggatttttaaagtgttaggattataggcgtgagttattgtatttagttttttttgttgagatagaatttcgttttgttgtttaggttggagtgtagtggtataattttagtttattgtaatttttgtttttcgggtttaagcgatttttttgttttagtttaatgaatagttgggattataggcgattattattatattcggttaatttttgtatttttagtagagatggggttttattaagttggttaggttggttttgaatttttaattttgtgatttttttattttggttttttaaagtgttgggattataggtgtgagtttgatttgtttttagttttaaatatggtggtttggttagatacggtggtttacgtttgtggttttagttatttgggaggttgaagtgagaggatcgtttgagtttaggagattaaggttgtagtgagttatgatcgtgttattatattttagtttgggtaatagagtgagattttgttttaaaaaatataataaaataataaaataaatagagtggttagagaagcgttttttgaaaaagtgatatttgagtaaagatttttttttttttttttgagatggagttttattttgttatttaggttagagtgtagtggtgtaatttttatttattgtaatttttatttttcgggtttaagtgatttttttgttttagtttttagagtagttgggattataggtatttgttattacgtttagttggttaattttttgtatttttagtgagacggggttttattatgttggttaggttggttttgaatttttgattttatgattcgtttatttcgtttttttaaagtgttgggattataggtgtgagttattacgtttggtcgtttgattaaagattttaagtaagtaaaggaataagtttttgtttttttaggtttgtatatttttttaaattatttttttttattgatatttttgtttttattttggttaaattttatgtatttttttgggtaaagagagagaatagatagggtaagtattggttagagggtttttggtagaggatcgaggaaggtattgttaattaagtgttaggttgaggagaggatgtggaaggaggagatggggtaggtagagtgggtttggggagttgagggattatgtaaggtggatatacggttagaaagaaaaatatttatttttttttttttgagatagagtttttatttgtcgttagattggagtgtagtggcgcgattttggtttattttaatttttatattttgggtttaagcgatttttttgttttagttttttaagtagttgggattataggtgcgtattattatgtttaattaatttttgtaattttagtggagacgaggttttattatgttggttaagatggtttcgattttttgattttgtgatttatttattttggttttttaaagtattgagattatagatgtgagttattgcgtttagttagaaaaatatttattgattttaaagtggagttagcgttattgttgttgttagtgttgaatttagaattatagttggatatgggattagaggatgaataagagatgttgattgggtttagagatggtaaggaggaggaggaagaggaagaggaggaattagttaatttttaataaaagcgagagagtagtgcgtgtagttgaagaaaggagtaaagtttcggagtagttggagttttgtgatgagtacgtgttttttagattatagataggagaggattgtataaagttttttgatttttttaatgtaagggattattgtatggtttataaattttttaatagtttgaaatgaatgtgtagatttttttattttagtttttattatttgggtatttttttatggttttaaatataatatttgtttttaatttgtgtaattataagtttatgtgaattttatggatttttggtttaggtaaatagtttttttgtaattggtagtaattttattttaataagggaattgtgatttgtaaaacgaaaaaatatattgtttttttttttttttttttttttatttaagggttagtgaattttgggattttagggttatatcgaggtatatttattattattattatagtttaggattaaaaggaagttattttaggttttttgtaaagaattttagttttttttgtttgtttgttttattttgttttgagatggagttttgttttgttggttaggttggagtgtagtggtgtagtttttgtttattgtaatttttattttttaggtttaagtgatttttttgttttagtttttcgagtagttgggattataggtattcgttattatgtttggttaattttttgtatttttagtagagatagggttttattatgttagttaggatggttttaattttttgattttatgatcggttcgtttcggttttttaaagtgttgggattataggcgtgagttattgcgtttggttaagaatattattttttatattaattatgtggagattttttttatattaattaattttttagtttttggtagatattaattgggagttttgtagtttaatttagttttgatattttatttataattattagttatttaatttttaagttgaagggtttagttttataaggttgtttttattttagatattaattataaataagtttaggttttttaattgtttttatgatttttttttttggtttagtaattcgttggaatagtacgtagaatttaggtaaatattttatttatgttagttagtttattatgaaggataaaatttaggaatagttagatggaagagttgtttcggataaagtatcggggaagggggatttggagtttttttgttttttttgggtatttttttgtatttttatgtgtttattaatttggtagttttttaatttttattttttttgtttttttttatggaggttttattatgtaggtatatttgatttaatagttattagttggaggttagagggttggagttaaaagttttaattttttaattatatagttgtttattttggtaataaattttaattttaggggttttttaaaagttaatttattaatataaatttagttgtggttgaaaagagtttgttatgaataataaaagttttttttattttattatttaggaaattataagggttttaggaggtttggttaggagttaggatggagattaaaatatatatatatatatatatatatatacgtacgtatatatatattaatattttgagatagggagatagggtttcgttttgttatttaggttggagtgtagtggtataaatatggttattgtagttttgattttttaggtttaagcgatttttttttgttagttttttgagtaattgggattataggtatgtgttattatatttggttaatttttaaaattttttttagagatagggtttttttgtgttgtttaggttggttttgattgtttgggtttaagtaatttttttattttggttttttaaagtgttgggattataggtttgagttatcgtgtttgattttttttttttttttattttttattttttgagatagttttttgttttgttatttaggttggagtgtagtggtattattatagtttattgtagttttaattttttgggtttaagtaatttttttattttagttttttaagtagttgggattcgtattattatgtttggtttattttaaaattttttgtagagatgaagtttcgttaggttgtttaggttggttttgaatttttgggtttaagtgattttttggttttagttttttagagtgttgggattatatgtgttaattattatatttaatttatatatatatatatttatttatttttttttcgagatggagttttgttttgttgtttaggttagagtgtagtggcgcgattttcgtttattgtaagttttattttttaggtttacgttatttttttgttttagttttttgagtagttgggattataggcgtttgttattacgttcggttaattttttgtgtttttagtagagacggggttttattatgttagttaggatggtttcgattttttgattttgtgatttgatcgttttggttttttaaagtgttgggattataggtatgagttatcgcgtttggtttttttttttgtggggggatggagtttcgttttgtcgtttaggttggagtgtagtggcgatttcggtttattgtaagtttcgttttttggttttacgttatttttttgttttagtttttcgagtagttgggattataggtgtttgtttttatattcggttaatttttttttgtatttttagtagagacgaggttttattatgttagttaggatggttttgattttttgatttcgtgatttgtttttttcggttttttaaagtgttgggattataggtgtgagttattatattcgggtttaaaaatatatatttttattataataatattataatgggagaagaatattttaggtggagggaatagtaagtttaaaggttttgatgtgagagtagtgtggatatttggagtgtttatggagtagtagggaggtttgtgttgttgaagttaggtgaggaggaggttagtttgggtagggttttgtaaagattttggtttttattttgagtgagattgttttttagattggtttttttattgagaatggtttgatagattattggggtgagatagtgtttagatgtttagaaaaattgtttgggatagagagaatgatagttgttttgattgtgggataaaaatgaagattaggtttggcgcggtggtttatttttgtaattttagtattttgggaggtcgaggtaggtagattatttgaggttaggagtttgagattagttcgataaatatggagaaatttcgtttttattaaatgtataaaattagttaggtatggtggcgtatgtttgtaattttagttatttgggtggttgaggtaggagaatcgtttgaatttgggaggtggagattgtagtgagtcgagattacgttattgtattttagtttgggtaataagcgaaattttattttttttattaaaaaaagtgaatattgaagggtatataggaagataagcgggtggagaaggaaatttagggttttttgagaaggaaatagagatgaggggaaaagaatagatatgtaagaagatgttggggtttagaaagtgatattttaaagattggtgttttgaaatgttgagaggttttagaagttgttttagaattgttttattatattttttggaatttttttatttgattgaaaaaatttttttgtaaaagaagtgtaattgttttaagattttttgtttagagattttattaaatgattagattaattattagagagaagatattaggagttattattatatttagatagattttttttttttttttttttttttttttgagttagcgttttgttttgttgtttagtttggagtgtagtggtatggttatggtttattgtagttttaatttttaggtttaagtgatttttttattttagttttttgagtagttgggacgataggtatgtgttattacgttttaggttttttttttttttttttttgagatggagtttttttttgttatttaggttggagtgtagtgatatgattttagtttattgtaattttttttttttgggtttaagtaatttttttgttttagttttcggagtagttggggttataggcgttcgttattacgtttagttaagttttgtattttttaggagagaaggagttttattatgttggttttggttgatttcgaatttttgattttaggtgatttatttgttttgtttttttaaagtgttgggattatagatatgagttattgtatttagttatggtgattaattatttttttttttttttttttgagatagagttttatattgtcgttcgggttggtgtgtagtagcgcgatttcggtttattgtaatttttatttttcggatttaagtgatatttttgttttagttttttaagtagttaggattgtaggtattcgttattacgtttagtaatttttttttttttttgagacggagtttcgttttgtcgtttaggttggtgtgtagtgataggattttagtttattgtaagttttattttttgggtttatgttattatttttttgtatttttagtagagatggggttttattatgttgtttaggttggttttaaatttttgatttcgtgatttgtttattttggttttttaaagtgttgggattataggcgtgagttatagtgttggttttttttttttttttttttagatagagttttgttttgttatttaggttggagtgtagtggtatgattttggtttattgtaatttttgttttatgggtttaagagattttttcgttttagttttttgagtagttgggattatagatgcgcgttattaagtttagttaatttttttgtatgtttagtagagatagggttttgttatgttggttaggatggtttggattttttgatttcgtgattcgttttttttagttttttaaagtgttaggattataggcgtaagttatcgtgtttggtttttttttttttttttttttaaatatagagataatggattataatatagagatatttttattttaatgttagtataacggggatgtagatggttaggatttggagatttgtaggaatagagtagtgagttaaagtgtagtttggtttatgtttaattataattatatttttgtttagattttagtatgtaatttttgttaattttgggatagttttaatttattttattgaaagtttttattaatattttgataattggaatttgatttcgatgtaattttttttttttgagacggagttttgttttgttatttagattggagtgtaatggcgtgatttcggtttattgtaattttcgtttttcggttttagtaatttttttgttttagttttttaggtagttaagattataggcgtcgattattatgtttagttaattttttgtttttagtagagatagggttttgttatgttggttaggttgttttcgaatttttgattttgggtgatttatttgtttcggttttttaaagtgttgggattataggcgtgagttattgcgtttggtcgatttgtttttgtatgtatattttttaaattttatgttttattagaatgttaaagggatttgtggtataaaataattaagaattattgttgtaatttttttttttttttatttttttgagtttgggagtggaaatattttttgtagtttttttatataatatttttatttttgtgtgtgcgtgtgttttgtttgttttgttttgtttttgggatggagtttcgttttgttatttaggttggagtgtagtgaagtgatgttagtttagtgtaatttttattttttaggtttaagcgatttttttgttttagtttttttagtagttgggattatagatgtatgttattacgtttggttaattttttgtatttttagtagagatggggttttatcgtgttagttaggatagttttgattttttgatttcgtgatttattttttttagttttttaaagtgttgcgattataggtatgagttatcgtattcgttgtttttaataatgtttttgtttgtttaatatatagtttttgagagatgtgagtttttttttaatattgtaggttatttttttgtcgttgttgtataaatttttttttttttttgagatggagttttattttgtcgtttagattggagtgtagtggcgtgattttggtttattgtaatttttgttttttgggtttaagcgattttttttttgagtagttgggattataggtgtatgttattacgtttggttattttttgtatttttagtagagacggagttttattatattggttaggttggtttcgaatttttgatttcgtgatttatttttttcggttttttaaagtgttgggattataagcggtagttattgtgtttggtttaaatttttttttttaagtatttttgtgtagagattttaagggtaaataagagtagtgttaattagtttggtagagttgaggtaggtttgaattttggtttttagagggaagaggtgattagttattagtttttttttatttttttatttagagagaaatggggaaggaagagaaatggagtaaaagaataaggtatgtagatggggagagatgggaagggaaaatatggagaatgatggggaggtagaaagtgatgcgaagagagatggaggaagatagagagagagaaagacggagaggtagattagatacggtagtttatatttgtaattttagtattttgggaggttgaggtaggtggattatttgaggttaggagtttaagattagtttggttaatatggtaaaattttatttttattaaaaatataaaaattagttaggggtggtggtatgtgtttgtaattttagttattttggaggttggggtaggagaattatttgaatttgggaggtggaggttatagtgagttgagagcgtaaaaaaaaaaaaagaaaaaaaatagaatgttttacgtggaaggtgttcgttgaatatttgttgaatgagtgaataagtagaagtgtgtatgtatgtgatagagaggtagaggggtaggggtgtgtagagatgtggcgtttgagtggatacgggggaagaaataagtaatatgaataatatggtgagatagaaagagttgtggatagagttgtgggaaatatgagagataaggagagagatattgaaaagagcgattaagagagatgaagatagggtgtttggtttatggaaggttttcgtgaagagtaatgttgaatagatgaatgaattttaatgtttagtagtggtgggatgaaggggatgttgtgtagaaattatattatttattagagaagtaattttgttcgtttttttttgagttgatgagggatttagtaattagtggaatgaagagtaagggaaagatatttgcgattttttagaagtaaaatggatagggtttggagattttttggatgggggaattgagggagaaggtagagtaggatgaattttaggtgtttgttttaagtgattggggttttgtgtttttatttattgggatagggatgataggaggttgatttggtttgagtggatattgatgattttgaaatgtttgtggagtatttagggtaagtcgtttagagagtagttagatagtgtggatttaggttttaagaaagaggtttgagggggagatgtagattggggatttgatagagaataagtagtagtgataattgtggttatgataggattgtttaggaaagttatggtagatgcgtaaaatttattgaatgaaagtgggaagttaggtgtatgtttataattttagttacgtgaaaggttgaggtcggaggaatatttaaagttcggagttaggattttgagattagtttgggtaatatagtgagattttattttaaaaatatatataataaaaaatatataataatattttttaaaaagaaagtggggttaggggtgttagtttatgtttataattttagtattttgggaggtcgaggtaggcggattatttgaggttaggagttcgagattagtttgatcgatatggtgaaattttatttttattaaaaatataaaattagttgggtgtggtggtatatgtttgtaattttagttatttgggaggttaaggtagaagaattatttgaacgtaggaggcggaggttgtagtgagtcgagatcgtattattgtattttagtttgggtaataagagtaaaattttgttttaaaaaaaaaaaaaaaaaaaagtgggagaaataatttaaaaattttttaataggatagtggtataaaagtatacgtttagggtataggagtttgggggatttaggttggatggtttttatgtttttgggaaagaggaggtgagattttaaagtgaaatagtttttatggtgataggatttgagatgtaggttatggagagttaaggtgatgattggagtggataaggtgaaataattgtgaagttgtatatttagggtattgaaaaggtatttgcgagatgggtataagaagttttatagtagattgagttataataagaaaaataaaaaatagaaataatttaattgtattttattaggtgaatagattaataagttgtgttatattatataaaggattattatttagtaaaaaaaaggaatgaaatattgatatatataatagcgtgggcgaattttatagatattaagtagaatgaaaggagttagatataagagtatgtattatatgattttattaatatgatgtttaagaatagattaatttatagaggtcgagcgtagtggtttaggtttgtaattttaatatttagagaggttaaggtaggaggattatttgagtttaggagttagaatttagtttgggtaatatagaaggatttcgtttttataaaaaaaaattttttttttttttttgagatagagttttgttttgttattcgggttggagtgtaatgacgcgatttcggtttattgtaatttttgttttttaggtttaagtaatttttttgttttagtttttcgagtagttgggattataggtatgtgttattacgttcggttgattttttttttttttttttgtatttttagtagagatggggttttattgtgttagttagtatggttttgagtttttgattttgtgatttttttgtttcggttttttaaagtgttaggattataggtttaaattattgtatttagtttataaaaaaattgttaaaaaattagttgggtgcggtggtatatgtttgtagtcgtagttatttaggagattgaggtgggaggatggtttgagtttaggaggttaaggtagtagtgaattataattgtattattgtattttaatttgggtaatagagtaagattttgttttaagaaaaaagtttatagaggttaaaaatggtaaaatggttgtatttaggaggggaaagggatttattaaaaaggggtatggaggaattttttaggataatgagaattatttatatttttattatagtgtggttgtatgggtgtatatattggttaaaggttattaaattgtatattaagatttgtgtattttattgtatgaaattatatattaatgtttaaaaatgttatttatggttgggtacggtggtttacgtttgtaattttagtattttgggaggtcgaggtaggtggattacgaggttaggagattgagattattttggttaatatggtgaaattttgtttttattaaaaaatataaaaaaattagttaggtatggtggttggtgtttgtagttttagttattagggaggttgaggtaggagaatggcgtgaatttaggaggtggagtttgtagggagtcgagattacgttattgtattttagtttgggtgatagagtaagatttttttttaaaaaaaaaaaaaaaaaaagttatttatatggatattaagtttattaaggagttggtagaggttgaaatagagaggaagtgggttgggtatggtggtttacgtttataattttagtattttgggaggtcgaggtgggcggattataaggtttggagttcgagattagtttggttaatatggtgaaattttttttttattaaaaatataaaaattagtttggtatggtggtaggtgtttgtaattttagttattttggaggttggggtaggagaatcgtttgaatttgggaggtagaggttgcggtgaattaagattacgttattgtattttagtaataatagtaaaattttgttttaaaaaaaaaaaaaagaaaaaagaaaaaagaaagaaaaaataaatagagaagaggttgtagagttagggatgggtttttgatgaatgtgagggcgagtggacgatattaaggagagattgaaggtcgtgaggttagatgttatgagttttagaggagaagttgtttttagaagttgaaagtattattatttgggagttatttattagttgaaaaatattgataagatttggttagagaagttatttaattttatttttgttagtacgtagaggaattttggtgggggtgggggaaagatgagattatttgtgttggattgtggatttttgtgtttttatttgtttttatggtttgagttgggagtttattggttttaattatatttagttagtttatagtttgttgttaaagaagttagattagagattgggtgcggcggtttacgtttgtaattttagtattttgggaggttgaagtaggtggattatttgaggttaggagtttaaaattagtttggttaatatggtgaaattttgtttttagtaaaaatataaaaaagttagttaggtatggtgataggcgttgtagttttagttatttgggaggttgaggtaggagaatcgtttgaattcgggaggtagaggttgtagtgagcggaaattatattattgtattttagtttgggcgatagagcgagatttttttttaaaaaaaaaaaaataaaaaaaatatatataaaaatagagattagtgtatatttattttaatattgttttatttgttgtttttttttttgagtgtttgggaataatttttttagaaaagttttatttttggttaggatggatgtagtggtttacgtttgtaattttagtattttgggaggtcgacgtgggtggattacgaggttaggagtttaagattagtttggttaagatagtgaaatttcgtttttattaaaaatatgaaaattagttgggtatggtagtgggtgtttgtaattttggttatttaggaggttgaggtaggagaattttttgaattcgggaggcggaggttgtagtgagtcgagatcgtattattgtattttagtttgggtaatagaataagattttgttttaagaaaaaaaaaagaaaaaaaaagttttatttttgtgtttattgtgttgattagcgtagtagtttttgttttgtaggttagttttttttagaggtttttagagttattaaaaggggttttttgaatgtatatatatattaggatttattttagatggattgaaaaaaaaaatttatatattgtttttggaatttggaatatttttagttatgataaatgtttagaagttttagatatagaaaagagttgggagagtaggatgtttttgagtttaggtgtagtaatggtattgttatttttgtataggacgggggaagtattggagaagaattatatattgaatatttagggtaatggggtttggaagtttataggtggtatttttagtttatagtagtggtattaggattttaatttaggttgatttgttttttaagttatattgttttgggacgtggagtagaattatgtgattgagtgtatattgtggaagagtggagtttgtttttttttttttttgagacggagttttgttcgttgtttaggttggagtgtagtggtataatgttggtttattgtaattttcgttttttggatttaagtgattttcgtgttttagttatttaagtagttgggattataggtacgtattattacgtttggttaagttttgtatttttagtagagatggggatttattatgttggttagattggtttcgaattttcgattttaggtgatttgtttatttcggttatttaaagtgttgggattataggcgtgggttattgttttcggtcggaagagtggagttttatttttagttagttatttattttacgtttttattggtggtgattttttttttttttttaaatcgtgggttttttatagttgagatagtagagataattttttttatattgattttttggggtgtgaatggggtgttgatagaaggaggtaagtaaggtaggggatcgggtagaagttggaattaaggtttagttgagaaaagttattattggtagttcgggttttttatgttttttgattattagggggtaggttttgttttgttatgacgtttttattttatattttttagttagatatttttggggtggtagttatttcgttgttggagaatggttgagttggttttttttaggttgtgtggtatgtgtggttgtttcggtagtttagggaggtaaaataatttgtttaagattagattgggtatagtggtttatatttgtaattttagtattttgggaggtcgaagtgggaggattgttttaggttaggagttttagattagtttgggtaatacggtgagattttgtttgtataaaaaataaaaataagtgagttaaacgtgatgatgtgtgtttgtagttttaaatattttggaggttgacgtgggagggttatttgagtttaggagtttaaagtttaaggttacggggagttatgattatatgattatatcgttgtattttagaatggttgatagagtgagattttgttttaaaaaaaaaaaaaggttgtataatataattgtggggattgcgggggagttgatatttgaatttagatttattttaaattagtatttttaattatgagatgattgtttttttaaaagaaagttttgaattattttagtgatgggtgggaattggatagtttataaaagtattgtgatatagagttagaaatatagatataaaggaaaaaatatatattaggttaggtgtggtggtttatatttgtaattttagtattttgggaggttaaggcgggtggattatttaaggttaggtgtttaagattagtttggttaatatggtaaaatttcgttagtattaaaaatataaaaattagtcgagtgtggtggtatacgtttgtgaatttagatattcgggaggttgaggtacgtgaatcgtttgagtttgggaagtagaggttgtaatgagttaagattgtgttattgtattttagtttgggcgattgaacgagattgttttataataataatagtaataataataatatgtatttatataaaatgagttaggttgggcgcggtggtttacgtttgtaattttagtattttgggaggttaaggcgggcggattataaggttaggagtttgagattagtttggttaatatggtgaaatttagtttttattaaaaatataaaaattagttgggtgtggtggcgtacgtttgtatttttagttattcgggaggcggaggtaggagaatcgtttgaattcgggaggtagaggttgtagtgagttgagattgagttattgtattttagtttgggtaataagaataagattttattttaaaataaataaataaataaaataaataaaaggagttagattaggagtttgagatttggataatatagtaagatgttgttttttaaaaataaataaaagtaaaaagttaggtgtgatggtatatattagtattttaagttatttgggaggttgaggtaggaggattgtttgagtttaggagatcgaggttgtagtgagtaatgattatattattgtatttttgtttgagtgatagagtgagatttttgtttttaaaaaatgtaatagtaaaaggagttagaagggggtatgcggtaaggggtggatatatggtatattatatgttattttttatttttatgtgttgtattattttttgtagttgtgtgatatatatataagagtgtttggtatatttttgtattaatttttgtagaggtattattttgttttattgtgttttatagatgtgtatttttttatatattgaagtttgtggtaattttgtgttgagtaagtttgtaggtgttatttttttaatagtttgtgtttattttgtgttttagtggtatattttggtaatttttgtaatattttaaatttttttttgattattttatttgttatgatttgttagtagtgattttttttttttgagatagggttttattttgttatttaggttggagtgtagtggtaagattatagtttattgtagtttcgaaattttgggtttaagtgatttttttgttttagttttttaagtagttaagattattggaatatattagtatatttggttaattttatttatttatttatttaggtagagttttgtttttgttgtttaagttggagtataatggtacgattttagtttattattattttcgttttttagtgatttttttgttttcgtttttcgagtagttgggattatcggtatgcgttattacgttcgattaattttgtatttttagtagagacggggtttttttatgttggttaggttggttttgaattaacgattttaagtgatttgttttttttggttttttaaagtgttgggatgataggagttagttattgtgtttggatttttttttttttttttgtagagttgaggttggttaagcgtagtggtttatgtttgtaattttagtattttgagaggtcgagtgggtaaattatttgagtttaggagtttgagattagtttggataatatggtaagattttgtttttataaaaaatataaaaattatttaggtatggtggtgtgtggtagttatttaggaggttgaggtgggaagatggtgtgagtttatgaggttgaagttgtagtgagtcgtgattgtgttattgtattttagtttaggtaatagagtgagattttgttttaaaaagagagagagagagagaaggttttgttttgttgtttaggttggagtgttatggagttatggtttttataagtaaaatcgtagtatattgtagttttgaatttttgtttttaagtgatttttttattttagttttttgagtagtagagatataggtatatattattgtatttggtaagaattagttaaatttattttgttacgttgtgtaaatggaataataaagtttagatggttggatgtggtggtttatgtttataattttagtattttgggaagttgaggtgggcggattatttgaggttaggagtttaagattagtttggttaagatggttaaattttgtttttattaaaaatataaaaattagtcgggtgtggtggtagttatttgtaattttagatattagggaggttgaggtaggagaattatttgaatttagagggcggaggttgtagtgagttaaaattgtattattgtattttagtttgggtgatagagtaagattttattttaaaaaaatatataaataaataaataaataaataaaagtttagatgatagtatatttgtttataacgtggtttattgattttaaaattttttttttttttgtttgtttgtttgtttttgagatacggttttaatatgttgtttaggttgtagtatagtagtatgattttaatttattgaaatttttgttttttagagttaaatgatttttttattttagttttttgagtagttgggattatagatatgagttattatgtttagttaatttttgtattttttgtagagatagggtttcgttaggttgtttaggttgatttttaatttttttttttttttttttttttttgagataaagttttgttttgttatttaggttggagtgtagtggcgtaatttcggttaattgtaatttttgtttttaaggtttaagtgatttttttgttttagttttttgagtagttgggattataggtagatgttattatatttagttaattttttgtatttttagtagagatggggttttatcgtgttagttaggatggtttcgattttttgaattcgtgattcgtttattttagttttttaaagtgttgggattataggtatgagttattatgtttggtttggtttttaattttttaatttaagtgatttgtttttttgggttttttaaagtattgggattataggtgtgatttattatatttagttaaaattatttttttttaaattttatttattattatttttaatttaaattgtattttatttagagataaggtttttttttattgtttaggttgaaatgtagtggtaaaattatagtttattgtatttttgaaatttttgggtttaaggaattttttttttttaattttttgagtagttggtattataggtgtgtgttattatgtttagttaagtttaaatttttttgtagagatagggttttgttatgttgtttaggttggttttaaatttttggttttaagtcgtttttttattttggttttttaaagtgttgggattataagtgtaagttattatgtttcgttggtttattgaatattttaagtttattgttgaggtttattgtttcgaaaaataagatttttttaaaatgattattgtttattgataatgtatatagttatttaagagttttgatggagatgtttaaagagacgaatgttgtttttttttttttttttttttttttttgagacggagtttcgtttttgttgtttaggttggagtgtaatggtgcgatattagtttattgtaattttcgttttttgggtttaagtgatttttttgttttagtttttcgagtagttgggattataggtgcgttttattatattcggttaattttgtatttttagtagagacggggtttttttatgttgattagattggtttcggatttttgattttaggtgatttttttattttagttttttaaagtgttgggattataggtatgagttattacgtttagttgaatgttgtttttttgtttgttaatataatatttattttgtagtttatggtttaaggagtaatttagatttttaagttttattatttaagaaatatatttcgttaggtatggtgatttatgtattttgggaggtttaagtggatggattgtttgagtttaggagttggatatcggtttgggtaatatagggagattttatttttataaaaaatataaaaattagtttggtgtggtggtgtgcgtttgtagttttagttatttaggagattgaagtgggaggattaattgagttttggaggttgaggttgtagtgagtcgtgatggcgttattgaattttagtttgggtgagatagagttagattttgttttaaaaaattaaaataggaattttagtattttgggagggcgaggttggtggattatttgagattaggagttggagattagtttggttaatatggtaaaattttgtttttataaaaaatataaaatttagttgggtttggtgatgtgcgtttgtaattttagttatttgggaggttgaggtaagagaattgtttgaatttaggaggtagaggttgtagtgagtcgagattgtgttattgtattttagtttgggcgatagagtgagattttagtttaaaaaaaaaataaaaaataaaaaaatttaattaaatatatatatatatatatatatatatatatatatatatatatatatatataaggtgattgttatgtaaattaaatatagttttattaattagtttgttttttttaattttttatagaaattttggagtagttttggggtgtagtgaggttagattttaggaagggaatgggtgggatgggtttgggtattggtgagtagtagggagggtaagtaggttagtttttgggttaaggagggtttttgtaggtttgttttgggtaaaagttggtttttttgaatttcggaaggtgggggaatttatattttggttttattcgtttaatcgtttatttatttttgggttagtagttatttaagttttatttttttttttatacgtttagttagtttgttataagttggttttttggttttttagagattttgatattttttttagtagtatttgttttttttttttagggaggtaagtatttgatgttcgaggtttttggtagttgtggtttttggtaagtgatgtgtgagtttcgtgtgttataggaagttttttatttttatttggtgattaaaggtttggttataagtagtgagtttttttttttttatttagattttattgtttagatttttttcgttaattgggatatttttcgatatggtttggatgttgttgtttattttgattatggtttatttaggtgatagggcgtgcgtttaggattttaaggagtgtgggtgggaggagggagatttaggaggttggattagatgttatagggaacgggtttggtgggggttgaaatatacggttttgagggaggagtgggattgttttaaaggtgatatttagtggatttttttaatttatagtttttttgtgttatttattgtgaggttttttagtttgagagatttaagtaaatttatgataaattttttggtgaaatttttttttttttttttttgagattgagtttcgttttgtcgtttggttggagtgtcgtggtgcgattttggtttattgtaatttttgttttttatgtttaggtgatttttttgttttagttttttgagtagttgggattatacgtacgtacgattatatttggttaattttttttttttttgagacggagttttgttttgttatttaggttggagtgtagtggtatgattttggtttattgtaatttttgttttttagatttaagtaatttttttgttttagttttttaggtagttgggattataagcgcgtattattatatttaattaatttttgtatttttagtagagatagggttttattatgttggtcgggttggttttgaatttttgattttaggtgatttgtttgtttcggttttttaaagtgcggggattataggtttgagttattgcgtttagttatttttgtatttttagtagagatggggttttgttatgttggttaggttggttttaaatttttgattttaagtgatttgtttgtttcggttttttaaattattggaattataggtatgagttattgcgttcgtttggtggtgaaattttttttttgagatagttttattttgttgtttagtttagagtatagtggcggtattttagtttattgtagtttttattttttgggtaaaaatgatttttttgttttagttttttaagtagttaggattataggtgtatgttattattgttggttaatttgtgtatttttagtagagacgaggttttattatgttggttaggttggttttaaatttttgattttaggtgatttattcgttttggttttttaaagtgttgggattataggcgtgagttattgtattcggtcgaaattgtttttaatgaattgagagattttaattattaggtatattattaattaaatgtaggagtttttaaaatgtggatttttgggaatttagaataaatttttaggttttattttagatttattgagtttaggaatttgttttagtagatgttttaggtaatttttatatatatttaagtttgagaattattgaaatagaatgatttgtaaatttttttaagtagataatttaattagggattttaatatttggtttaatttattaatatggacgggttaaataggaattttaattaattaaggttacgtttttatttggagatttaattagttattttttttaacgaaaattaagagtggttgggtgtattttgggaggtcgaggtaggtggattatttgagattaggagtttgagattagtttggttcgaggtgggtggattatttgaggttaggagtttgagattagatggtgaaattttgtttcgattgaaaatataaaaattagttagtcgtggtggtgggtgtttgtagttttagttatttgggaggttgaggtattaggatcgtttgaatttaggggacggagtttgtagtgagttaagattgtattattgtattttagtttgggtaatagagtaagattttattttaaaaaaagaaaaaagaaaaagaggaaggatggtttattgtataatgttatttgtattaaaataatatttggataatataatgagtgatattagttaattaggtagttgtatttattaatgagtttaattttattatgatggtttatattttagttagataagttattattgaattggttggagaatgatggtagagggtgagagtgagagttggtataggaagaatttgaaaaatgatttttattttttattttttgagatggagttttgttttgtcgtttaggttggagtgtaatggcgtaattttggtttattgtaatttttgtttttcgggtttaagcgatttttttgttttagtttttcgagtagttgggattataggtgtatattattatgttcggttaatttttgtatttttttagtagagacggggttttattatgttggttaggatggtttcgattttttgatttggtgattcgtttatttcggttttttaaagtgttgggattataggcgtgagttattgtatttagtcgaaaaatgatttaataagtaatgttaagaaattagattggttaagagggaagggtttaatgaggttttaaagtatttatttttatgtattttatgtttggagaaagttgggatgttttattttaagttttgttgttttttttttttggaataattggggaggtgtttttttgggttttttttttgtttttaggattttgtgttttttgggtgttttagttttttgagattcgtattttggaaggattttttgtttttttgttttgtttttttaatgttagttaagggagattggttattggtttcgttacgtggtttcgagatgaggtggttttagggaaggaggtgaggaatggaattttagagtttaggggtcgtttggttttatttgttttttttcgttttttttatgattattaggttgagttgtatattcgggacgtgcgaggttatgacgttagtatttacgtgtgtagagtggaggtgttgggttttggtgtcgggatagggaatgggattcggttggtggtggagaaaggtgagatgttgggaggtggtgtttttttttggttggaggttttaagaggtaatgtttttgggaggtagggatgtttttttgaggttttttttttttttgagtttgtgtgtattttttttttaattttcgtttttattgttttatgtagaatatttttagttaggggttggtatagtttttttttttcgggttggattttatgttgttagttttttttttgtggtcgtgggtagtatcgtttattattagggtaaatgtgagtaatggagttaggggtaatagtggacgggatgggaggggtagtaagagagtgggaggagggaggatagagattaggaagaggagagtttcgggattgtaatattgagtagtttttgttttttttttgattaggttattgttatatgggaatatattgttattttttagatgggtttcgaggagtgattttagagtttagatgtttttagttttttttaaaagattttaataaatttgttttattattaattttttatgagttttaagtgtttttttttttattttttagatgttaaatttatttttttcggatttttttaattttgaatttttttttttattaggtttgatttggaaaggtttaagaaggtagttgtcggttgtggttttagcgttttttttattattatgtgggagtttagtatatttgttttttttagttttaggaggttgagtttgattgttttgagaaatgggaaggattagatatgatttttttttggtaattgtttttttttgttaggtttatatatatttttttttggttgttaggggagtttgggtttttgaatattgttatttatttaataaattattatttgattttagagtgggtggaagggtgagttatgtgttttttttattttaatttttaaaaaatttaaaaaattttttatttaaaggttaaaaagttatataagttttgatgatgattaatttgaacggaggttcgagatggattgagaggattgagatatagaagtggggggattatggtttttattggttggattatagggggattttgtttattcgtttgggttgaggaaggtgtttggggtgtttaggtgggtttgtttttagtaatgtaggtatagttagtttttggattttttttggtgttttttttgtttttgtttttgaggttaggttttttattgttgggtattggtagtttttgtagagatgtatagtggagtttttgttttgaggagttttgggtttgggattaggatagaaggtgttgatgggaggcgatgtcgttagatttttttttgtgagttttgtttttatttttagttttttttattttttttttttttttttttttttttttttttttttttttttttttttttttttttttttttttttggagatagagttttattatgttgtttaggattgtttttaatttttgagtttaagttatttttttgttttagttttgcgatagttggaatgatagacgtgagttattgtgtttggttttggagttttttttttttttttttttttattgtttttttttttgtgttttttttatttttattttttttttgttttttttattttttgttttatttttttttttggtttttgttttatttttttttttttttttgtttcgattttttttgttttttttatgtttttattttttttttttttgtttttcgtttttaattttttttttagcgtttagttatgtttttttttatttatttatttaggattttttttgtttttttttttttttgtttttagatttatttagtttttttttagtttttttattggaagaaaagaagaagtttaatatagtttattttttgtgtttttttcgggttttttcgggttttttttattagtaggcgtggatttttttgttggttttttagtggttttagggttaggtagtgttttgggaaagtagtgggaaagcgtgtgggggtgggggtatagggggtattgttgtagggggagggagggagtgtagcgtttattttttcgatgtagttaatataggtaggcggatagaaggattattgttagaagtaggagttcgtttagttttaggttttcgtagatatatatatttttagggaagagggtttaaggttatgaagtttattttttttttagcgtattttagttttttggttggttgtagtttttttagattttttttttaatagttttagaggtagaaaaatatatttttagagtttttttattttagattttaatattttattttttattaggtttttgggtttttcgtgaggttttttttttttttgtattagttgtttttagaggtttgtttatttagttatgagttgtatatattattgttttttattattttttaagtttttaggattttttttatgtagatgtaagagatattttatttattattatttcgcgataatattaggttagggattagggattggtttggaggttaggaattttagtttttgtttttttaggcgaaatgattaggggttggtgatttgttttaagttttttatttgtgaagtgaggggttttttgttataatcgtttttaggttggggagttttttttatgtgttaattttgagttgggtattttttattttttattgttaatttttagaatatagggtattatggtgttcgttgtttaagtaaagattcgagatttaagtttggattttattaggttatttattttagaaaggtggagttggggtttaaggttagttttgtttaattttagagtttagtttttttttttgttttgggttgattacgtggtttggaggggattttttagttttggatggttttaggtgttggtaaggggatgatggaggggaaggagtttgggtttgggtgggtgtgggtattggggggaagaagggagggtgatattagtatatttagtaggtgggttgttttttgagtcgtagagtagcgcgggagtgtgggggtttttttggttggtgtggagagttgttttttataggtagatgttgttagggttgaagtggggtatggaggagtatttggggttttataatttttttttaggtatttttttttttttaattattggtttttgtttgagggtgaagagggggtcgttttttttattttagagttagatatattgattagggtttggaaattgggatttttttgggtttaagaggaattttggggggtggggagtagaagtgtaggtggaggttataagggtcgtgggtatagaaatgaattgtttttaatttttttggggagtagagatttagaggatttttcgacggtttagggaaatttaaatttatattttttttttttttattttagttttattttattttggggtgtgattatttttttattaaggtttttgtttatttttagtttatttagagtttgtggtttgtaggatggatagattttaaattggttagtgttgtttggttgaagagaagtgttgttattttagatatttttgttttttttttggttttaattttttttttagtttgggtttttttttagtattgttaggagaggaagttcggttttagggttagggttataatatttttttttttaaatttttgggtttgtagttagggttataatttgttttagttttagttattttattgattttgttattagttagtaaatatttattatttttaggtgttttttttgattaatttttttttattattttttatattgtatttgttgagattttttgattttggtatatgtttgtggatatatgtattttgttttagtttagattgggagttttggtatatttggtgttttggtgatttatttggtgttttgtagttttatgtagtaggttgtttggttgtttgattaataaatatgagagttaaaggtagttatattagatttatatgagttttgtggatagattaaggatagaaagttggtgataagttggtgataggaaaggaggtgtgggtaatataggtggattttttgtaggaggtagtattttggtattgaatatagaattaagtaaaggtagcggtttgaggttttttggagagatttgggtgaaggttttttagtggtattgtgatggagaaggagatgggtgttggaggattgtatatttattttttgaggagggtgaagattggggagcgtttgtaaggtaaggggtgaggaggagatgtggtgtttgggtgggtttatattaatttgcgtttttttttttaaatttaagaattttttatttttttttttatttttttttttattttttatgttttttatgttgaataatatttagggttttttgtttgtttgttttgttttttttatattttattattaaaaagtgtaaatatagggtgaaatgagaataattgtatagtgaatatatttttattatttagatgttattattaatattttttgttttgttttgtttttgagatggggttttattttgttatttagtttgaagtgtagtggtgaaattatagtttattgtagttttgaatttttgggtttagaggtttttttattttagttttttgagtagttaggattatagatattagttattatatgaggttttgtagaaatggggttttattatgttgtttaggttgattttgaatttttggttttaagtaatttttttattttagttttttaaagtgttggaattataggagtgggttattgtatttggttttattaatattttttatttgttttattatatatttattaatttattttatttttaaatattttttaaaattataaatattagtatattttatatttaaattttttagaagtttaatattgattggagtttagtatttatttttttattttttttttggtttgaggaaggtaaattttatatataaattttaagttagtatttttttttttttttgagacggagttttgttttgttgtttaggttggagtttagtggtgtgattttggtttattgtaatttttgttttttgggtataagcgatttttttgttttagttttttaagtagttgggattataggtttgtgttattatatttagttaatttttgtatttttaatggagaaggggttttattatgttggttaggttggttttaaatttttgattttaagtgatttatttgttttggttttttaaagtgttgggattataggtgtgagttatttcgtttggtttaatattgttttgtttgtttgtttttgtttttaagatagagttttgtttttgttatttaggttggagtgtaatggtatgatttcggtttattgtaattttcgttttttgggtttaagtgatttttttgttttagttttttaagtagttggaattaaaggtgtttattattacgtttcgttaatttttatatttttagtagagatggggttttattatgttgattaggttgttttcgagttttttattttagatgatttattttttttggttttttaaagtgttggtattataggtaagagttattgcgtttagttttagtatttagtttttaaattgttttgttattaaggttttggagttagatgtttgggtttaaattttggttttgttattgattttgtgagttttataagttttttaatttttttgtattttagtttttttttagggtttttgttaggattataattattggttgggtatgatggtttatgtttgtaattttagtattttaggaggttaatacgggtagattacgtgagtttaggagtttgagtttagtttgggtaatgtggtaaaaatttatttttataaaaaatgtaaaaattagttgggtatggtggtatgtgtttatagttttagttatttaggaggttgaggtaggtgaatttatagattttgggaggttaaggttgtagtgagttatgattttgttattgtattttagtttgggtgatatagcgagattttgttttaaaaaaaaaaattattaaagtgtgtaaattagtggtataaatatgttaagtgtattttgtgggttagttatattattattagtattacggaaatatatagagatgttattaagaaggggagatgattggagttatttttagtttttttggatttggtttttttttttttgattttttttttttttttttttttttttttttgagagagagttttagtttgttgtttaggttggagtgtaatggtgtaattttggtttattgtaatttttgttttttaggtttaagtgatttttttgttttagttttttgtgtagttggaattataggcgcgtgttattacgttcggttaattttttgtatttttagtagagatagggttttattatgttggttaggttggtttcgaatttttgattttaagtgatttatttgttttagttttttaaattgttgggattataggtgtaagttattatttcggttatttttttgatttttaattatttatgttgtttatatttattatttatgtggtttttgttgttttgttttggttatttttgtatttatttgtttttttatttatttatgtataaatatttagtaagtatttattaatggatagggtttattgtagatttggaagttttttgagggtgggagtatgtttcgtttatttgtttttattttttgtagtaagggaggtaaagttttatttttatttttttttagtgagttagtagttagtggtgaggttaaggtttattttttttttttttatttagtatagggggttggagatgagtaagggaacgggaggaggttagtttagtatgggaattagttttttttagggaatttagatatttattttttaagattttagtttttgttttagttcggtttttgattttagagacgggattagttttttttttagtatttattttgagggtatagaagaatgtaaattatattggaaatttggagatttgtgtttttattttagttttgttgattggttttttgtaagttattttttttttttgggttttagtttttttttttgttgagttagaagatgtttaaagatttttttggttttattttgagagtttgtttttttaattttaattttttttttagtttagagaatttaggtatttagttgttttattttagttttgggtaaataggaagttgggtgaggggagtaggggtgtgcggaaagttttagttaggtgtgtaggtttatagggagggggtgggttcgtttttgaggtatgaaagttttttgttttggttttggtttagttttaatgggggtattggggttggagggtaggggtgggaggttttaggggaggggtttttttttgttagttgtggtaggagttatttttttggtgattttgttgttggcggtgtttattattgttttggttgtgttggttttagtgttttaggattagggaggattggtgagtggttgtaataggttttggtggagagttgtattttgcggatgtttggttttttttggttgtgtttgtggttttttgttttttttggtttagttggttcggttgtttttggtggggatgttttgtttttttgttgattttttttttatgtttttgtgatgttgtgtttgtgtttcgatataagttttttgtgttttttttttttttttcgaggtatatttgttttttcgtttaagtatttatgttttgtttgtttttttttttaaggaggtgtgtgttggggatggtgttggtaggagaaattttaggtttgtagtttgggtttatttttagaggggtaggggtgatatgagttgaatttgaattttgggtattgtgattttatttaattaggtaacggagacggtcgatttcggggtataggtttagtaaggattgggtaagagtagattgttttttttttttcgttttagatttttaggggtttttagttttttgttgcgtttttagatatttttttttttaggaatttaggttttttatttttgcgttttgtttttttaagggtagtttgtatgggtggttgttttgtttttaatcgtggattttttgttttttttagggttttagaagttgttagaggaggagttagaaatagattttagtttcgggtttttagttgtttattttataggtaaggatttttaagatttgaataagagtgtaaataattcgaaggttttagttttgttcgtttagagtttttcggttttatgattttagtgttcggttttttattcgttttacgattttttgtcgttcgtgtttatttttacgttcgttttcgtagtgtagttttttttttttttcggtgtaagtaaaagtcggtttggaggtttttattatagcgttttgtattttatattcgtgttttttcggtttttaattcgtatttattttagaaatagtattattttttttttttcggttcggttcggttttcgtaggggttaaaagtcgttatttttttagaagttttaagtttttaggatcgtatttttaagagcgcgtcggttcgtgttttcgtaggcgtttcgttgaaggggtaggggttaggttgggagacgacgaaggaataggcgtttttgacgagcgggacgtagttttcggacgtcgaggggttggcgttttcgtaggacggtttttattatttttattgtttcgtcggttatcggggtcgggcgttttttggcggcggggatttttagggtcgttcggttacgttgcgtagttttttgtatcgggcggggggcgtttacgggtcgggtattttcgagttgttgttcgagggcgtcgagacggtgattttagtgttggattcggttaggagataagggtacgggtttttttggtatacgagcgtggggttcggcggtttggtgtagtttcggaggggcgagagggtgtacgttaatattagttatttcgatatggtggatttcgcgagagggaagattttttttggggtcgtgatggtggggtgagggaatatgagtgcgtggtgcgagtgcgtgaatattgggggttcggacgtttaggattttatggtagtgggaaaaatgtaggagattgtttggaaattgattttgaatttgatgaaaataaagaatggaaagttttagtgttgtcgataaagatgttgagttgcgatatacgttttaatttagggtgggtgtacgggtgcgggttaaatatttttagtatttttttggttgtttgaaataatttattataatatagtgtatggtttttgtttttagggatgatggtttgtttgttttattttttttttgtttttgaatggttaggttttattattagtttagttggagggtgggaggaagggggattttttaaatttcgaagtttttttaggtattttgatttttagggttatatggttttaattagattttgtattatattttttttttttgggtattttttaatagtgagaggggttattatagagtttagtaagtattatttagaaaggtttagtagtagagtaagtttttattatgatagaggaatgaagtttggaggggtttcgtatttttttttttagagttgtttgaaggtttttttgttttttattcgatagttaattttttttttttaaggagtttaatttaaggtttatggggtttgaagggaggaggttgaaggagaaagaaggggagaatattagagagagatggggatggtaggaaggagtttgtggtgtttgaaaatattaggaagttttggggaggaggaaaaatcgatgttttatttagggtgttttatttagggtgagacggaaaatttttattttttttttatattttaggtttttttttttaaaagtgagtaagtgtgggtgtttttgggatgagtaatagtgttttttattattttatggttgatttttagttataggttggaggaggtagagggtgatttaaggttttatttaggttattttaatgggttattttatttttttagtttattatatggtttttttttgtttggtattttagggttggaggtaaagtttaattttcgaatttagtgggggtttttagtttaggggggtttaattttcgtttttatatttgtttttggaattattatttttttgagatagggtttcgttttgttatttagacgggggtatagtggtatgattatagtttattgtaattttaaatttttgggtttgagtgatttttttgttttagttttttgaggagttaggattataggtatgtattattatatttgattaatttttaattttttttttagaaataaggttttgttatgttgtataggttggttttgaattagtgggtttaagtggtttttttattttagttttttaaagtgttgggataataggtatgagttattgcgttttatttttatttgtttttgattttttttagaagagtttttatttagggagggggtgttttttttttttcggattatttattttttatttttttttttttttattataaagattagtgggattaagtcggtatgtgagttttttatttatattttatttttatgttttatttttttttaaaaaatagagataggattttattatgttgtttaggttgttttggaatttttgggtttaagcgatttttttattttggttttgtaaagtggtaggattataggtgtatgttattacgttcggtagttcggttttttgttttttattgtttttagttttttcgattttatttattgagagaatggaaggggatagaatagttggaaattggttgaaggaagttagaatttattaagtgtttattgtgttaagggttgagtgaggttttttgatggaggttaggtttttttttatatgttttatgtgtggtggatatttttatttttattggatagataggttaagtggttggtttaggttgtagagttaggatagggtgatttgaagtttagatattcgaatttttggaagttttttggttgtgtgatttaggtatttgagaatgcggtttttttttagtttttttcggattgttggttagttgtaatagtcggaaattttatttgagttgtaggatttttttagtaaggattggaatttttagagttggaaatttttatgttttgagggagaggtaattaggtttaggtttttgttttttgggggatggggaatattttgttgggttttgtttatgtagggtttttagggttttaggagtttaaggatgggattgggttcgagggattttaaagtttgtggagagaggatttagggagtttttttttatttataagaagaggtagatgtagaattaattttaagaaggagattatgttttttttttaagtaaattttatttttcgttattgaatagtagggcgattatagatataatttttttggggagtagaggtttagtaatgagtgatagttggttattaaattagtattgtttagataatttaattagataaatattttaaaaaatataattaaaagaaggtatagaggttagggggttatatgggaatagtttattgtttagtttcgtttttacggaaaatatgtttgagttaaggtagtttttatattgggttttttaggatatttcggttttttaaataaatatatttatttgtaaataaataaataataaataaataataaataattataagtgtaaatataaatagagggagttggttttatggggagggttgggtttcgtgttttaaggaagtttggaaatatttggagagaggaaggtttaaggtttatttgtgttaatttttaggtgaggtttttttaagttttgtagtattttggttagaattaaaggttttttggtttttagattttagatgttagggattaaagttgtaggttttagtgagttttggaggttttagtttgaatttttagtggttgttagtattttattgtgtaggttatatatttttgaattttaggtttcgaagtggtggttttgttgtttaaagttttaagtttgggtttcgattttaagtttttaattttttttttgagttagaagaggttgagggtgtttgaaggagggggtaataaagggattggggtaggggaggcgtttgggaaggttggatgttcgttttttttatagggtaatgattttaaagtagatttgtttagattcggtaaagtcgagatagtcgggtcgattgattttagcgttgagtcggttatttttttttagttggaagattttttttagatagatgggtttatattagggtttggttttagttttttttggggtttttttttggtaggggtttttgatggtagagaggaggttgattttggtttggtaggagacggcgatgcggttgatggtgtgggtgaggagtatatgggtggaggggtagttttggtttttgaagaggatttgggagtagatgaggtataggttttttgatggtattattagttggttattttttagttttacgttattggttaggagggtattggttcggcggtttagttattggagttgttttttagtttgagggtttgttggagggagggagagagggagaggagagttagtgtggttatgtcggtttattttttatattttggttttcgagttttgtttattttatattcggtttttgttttttttgtttgttattttatattttatttggttatgacgttttgagtattttattaaggtttgtgttgtttttttattttttttttgagtttagcgagttttttttatattgtttttaagttttgtttattattagtcgggttttaatttttaaattttagttttttaagttttaagatatatttttagagtttttatttataatatgggttataggtttgttattcggggttcgagaagatgattttgaagaggagagagaaaagaaaaagttgagatttttaaattttttagaaaatatttttttatttttatttttatttatttttttttaagattaaaattttaaattttttttattgtttttatatcggtattaattttatttttaaatttaaatttagaattaggaaagaggtttggagatatttattgattgtttgggttagagggttgattagagagaggtttttggggaattgttggggagaaggagaatggttaatatcgagggagttatttttaaaggaggaatagttggttgtttgtttggtttgcgtttttagttttgaggtgtttggttttttttttttatttatttgtgtatttattttttaggtatttaatagttttttttttgagtgttttttgtgtgttagatattttatttttttttttttttattttttttatttttttttttagttgttatatttttcgttttttttgttttattatttttatttatattatttgtttttttttttatttttttttttatattttatatttgtttttatattttatttatatatttgtttgtttatttatttatttatttatttattttatatatatttagtgagtattttttatgtgttagatattttgtttttttattttttttttttttttttttttattttttgttatatttttttttgtattttcgtttttttttacgtttttttttttttatttttttttattagcgtatattttttatttattttattttttttttttttttgcgtttttatttttttttgggtgggagagtggatgaaggttggttaggtatttattttttttttttgggggtcgattattttaaagtgtagtaggtagaagagcgtggtggcgtttgttacgattaggaaggagaagaggttgaggaataagtatcgtttggagttttggggtttttttgtttttttggggagcgttttttcggttagttttacgtttcggattatgtttttagtgtttatggtgttttttttaggggagagagggtggagtcgtgggttagtatgtgagaggaagagaatttgtttggtagtttgttaggggatgtggcgtttgagggttgtttttagggggggtttgtagttgttttttttttttttagttggttttttgttgtttttgttgagggagcgtttgttggttgggtgtgttaataattgtttttatatgtttttggggcgagaggagggcggggaaagaattatttaattagcggaaaatttttttggtggagaaatttatgagtttatttggaggaagcggtagtgggttttgtattttttgtttcggttttttttttatcgcgggggcggggatttggaaagttggggatatataagtattaaggatattttttatattttttattttttttgtttcgatttcgaggggggttttttgggttattgattgatttgtgtgtaggattttggaggttgaatttcgtttttatgttttttaaaatttattgtttttattttttttggggattaggtttgtggtttgtttttttttaatttttagataggatgtaggaaaaagatagaattagaattgggaggggttttagaaagttgagtttttgagggagagaaaacggggttggagggaaaagttgtgttgagttttgaggtttgtgtttgggtttttgcggggagaaggagttgggggtttggtggtaggtttgaggttttaggaaaggttgggtgggggtagtagggataagtttgggatagtttcggggagtgaaattattttcgggaatttatagattttattggggtaggttttttttttttattttgattcggagatttataatgttggttttagttttggtttttaaggaattttggggtttttgattttttttatgaagtttttattttttagggttttagtgtgtggttatatttttttaaacgttttttgtattttatatttggaggttttggaggtttttttattttttggggttttttatatggttttgttttcgttaagggggggtttttatattcgatttttatagttttggatatttttttatttattgttgtggttatatttttttagaggttttttgtaatttattttttagagtcgttatatgtggttatattttttaggagttttttgattttcgtttttttagattttgattttttttttatttttttagttttttttttgttttttttgtagtagtttggcggttttatttggtgagtttattatatatttttgaagttttttgagtttttatttttttgttttttttatagtttttgttttttttgagttttttgtttttttttttattttttagatagattgggaagtttttatttttagatatatatatataagtagatagtattttagagaaaagaggtttattgggttttatcgagggtgtagatgttttcgtgtggggttttggtcggtagttggtttttagagtttttttttgttttttggggttttgtgattttttatgtttattttttttttttttggttagttttgtgcgtatgtttttttattttttattttttgggtttgtttttgtttttttttggatgtttttttattatttttttttttttattttttataaataaataatttaatttttttgtttttataaatagttttttttttgtttttagttattttttaagtttttttatgtgtttgttttttttttgtgtgtggatttaggttttatttagttggtgggatagattaatagttttgggttgggaatttttaggtaggtttgaaatttttagttagatagatattagggatggtttagggaggtgtggttttttgggatgtttagaattttttttttgaaagtttcggtgatttgattagggaagatttgagttgttggaatggttaaaggagaggtggtgacgatttttgaaatggttagaatggaggtagaatggggagaaggttttgaaattaattattttttttttttggatttttttaagttttatagagcgaaggttttaaagaagatagtattagggttgaggattaggtgggggatgttatttgtgtgggtggatagttggtttttttgggtgagttggaacgtagtttcgtggtatatcgagtgtagttagggtttttgtagttttggatatattattttttgggagttgaggagaggtatatggaaggggtattgggaggagaagagttggattttatgggttaggtagagtggggaggaggtggttttgggagagtaggtttttttagagaagattatttgggagtagacgaagtagatgttattggtggggattaggagagaattgttgtttaaggagaaattattttggaggaaggtacggttcgtgtttgttttttagagtagtgagttttgtttgttggggttttttaggaagagttataggggatgggggtgggagattaggggtttggattagaggttttaatttttgaggaagtgggtattgaataattgagtttttgggggatggtagggggaggtataggagtgggttttttttgttttttttagcgtgggggaagttgggggagaggggtggatgtttgggtttttgaggtaggggtaggaggagagttggtggggatatgtttgggaggttaggtggatgtttattaatgaggtgagtagtaggtttgaggttgttgtgggtaagatgtattttggggtgttgacgggtagtttgggtagttgaaggtgtgaggttaatattagggagtttttaggggagaatagagttgaggggggttttagggtttaaggtttggttgagttattttagtagtttttatttttttgttgttttatttgggttttaggtagtagaattagtagtagttttagaaggaggaggtgtagggtggtgttatatatttttgggaggaagagacgtttaggtggtgttatggggagaatttgtagagaaagagagagagagagagagatagtgagcggggcggggtacgcggcggaagatagatttttcgttttgggagatagtatttttcgattttcgagagagagatcgatagagaaggggataagatgtagttagagaaattttaaggtgagtagagggagatagagagagataggaagggaatagagaggaattatggtagaaatagagaatgtgtgatagagataatgagattgatagatggagagttagagatagagaaggaaattaaaattaaatttattaaggtttaggtttaggtaggtcggggatttaggtagtaggtgtaggagggatcgaggtttaggtagagggtaggatattgcggggcggtagtttaaagtacgaagtacgggtagtttaaggagatggggtaggagagttttatttgttgtgtggagtttttgggttcggacgtttaggtttttttatagaggaagcggtagtggtagcgtggtaggtagcgggcgggttttaggtcggggttggggttcggggaagtttttagggtttagaagatattgttgttttagttaaaggtaggaaaggttgaggtttaggagagaattataggttgggggtttaggcgattgagttttgggaaagggagtcgggttaggggaatcgtgggttgggagggttagggagtggggttaggtttagagttttaaagaagggatagttaatttagagaggaggcggttgagtagttggggtgtgagttggaggttcggttttttgaagagtaattatatataatatttttgtatttttggttgagtataggtttttttttttgtttattttttttttttgtatttttgtttttgttttaaataatttaaattatatttgttttagtatacggattttttagtttatttggtaggttttatattaagaaggtttattatatattttttttatcggggatattttggtgtttgttttttgtttaggtgaaaatattaatggattttttttttatttttgaaagtgttttagtttggaagataaattttttggtttttttatttagagatgatgttggatagttaagtatgatgaggttttattttatttttgaaggatgttttttatttttttttgattttaggtggtttttatagaatagatttatataattttaaataaatatatattttaggattaatgtggtagatattttttaaagttttttataaaggaagttttagaattttatatgggtgaggtttaagggtggtgatttagggtggggtggggatagttaagggatttgttttgaagttgtatttgtagagttaatatattattttaaaattgttttaggtttggtgtagtggtttatatttgtaattttggtattttgggagtttgaggtgggcggattatttgaggttaggagtttgagattagttggttaatatggtgaaattttatttttataataaatataaaaattagttaggcgtgttggtgcgtatttgtagttttagttattcgggaggttgaggttggagaattatttgaatttgggaggcggaggttgtagtgagttaagatcgtattattgtattttagtttgggggatagagtaagattttgttttaaaaaaaaaaaaaaaagtttttaaaattttttttttttttattgatatgtaatttaggtatgaggtggatattttttaagtgtatagttgatgaatttttttatttgtatgtagttattatttagttttacgtatttttaggtttttagtaggtttttttatgttttttttttgttgatattttttaaagataattaattatttttttatttttattattatagattatttttttttggtttggggtattatataaatgaaattatatagaatgtatttatttttgtttgattttttttagttagtattatgtttgtgagatttatatacgtggttgtatgtattagtaatgttttttaaaaaaattatgatgtaatattttattgtattaatatattttaatatattttgttgatggggatttggtttgtttttagtttttgtttaatataaaaaatgtttaatacgaatatttttatatatgagtttatttttatttagtttgtaagttataaggtttaaaaaaagtagtttttaaagatgattttatttattttttttaagtttgagataatattaatttgttattttaaatattattattgttattgatgtgattttatttggagagtgttagaggggttggagttggggttggtggtgattcggggtaaagtttattgttgtatggggtagattatttttttttttaggtataaggtttttgaggggttttggtgtaatatggagggatatgtaagtaatattttgggtgtgtatgagttattttttttgtttttttttatttgaggatttgtttttttgttttttatgttttattagttttagttattatttttgtaggggtagaaaggggtgatttttttttgatttattataagggttatggttaatatttttataataaaagatagattaataagagaaaagtataatatatttatttaattaaagttttaggtgatatgggagtttttagaaatgaagatttaaggatttaggggaaaattatttttatgtttagatttgatgaagaatgaatagttgtgtagaaatgtaattgaataaaaggagtattatttaatggttatagattgggattggggggattttagtaaggtttggttatattttttttggtttttttgtatagtattttttttttttaggtatagggtagaattttttttggaatgagggttttataatttattattagatgagataggttagaaaatttttttttttttttttttttttgagatagttttttattgtcgtataggttggagtgtagtggtacgattttggtttattgtaatttttgttttttaggtttaagttatttttttgttttagtttttcgagtagttgggattataggtatacgttattaagttcgttaaatttttttttgtatttttagtagagacggggttttattatgttggttaggttggttttgaatttttgattataggtgatttattagttttggttttttaaagtgttgggattatgggcgtgagttattgcgtttaattttttttttatttttttaattttattattttttgtgttagtgtgggttttttttttagtttttgtttttttttttttttttgtgttgtttttttttttagggttttttttgttttttgttgtttttttttgtttttttaatggtatgagttgatggattgggattttagttgagttatattaaaatataaaatgttattataaggttaggagtagtggtatatgtttgttattttagtattttgggaggttgaggcgagtagattataaggttaggagatagagataattttggttaatacggtgaaattttattattgttaaaaatataaaaaattagtcgagtatggtggtacgcgtttgtaattttagttattagggaagttgaggtaggagaattgtttgaatttaggaggcggaggttgtagtgagtcgagatcgtgttattgttttttagtttgggtaataaagtgagattttattttaaataaattaattaaaaaataaaataaaataaaataagtaaataaaaaaaggtattgtaattaatagtgagatatagagagaaatttaaattaaagaggaagaatgggatattgaaagataaaaaagggaaggtaagaagggtgatggggagatatgagagatatagaggaaggaagggtaagattgggttgaggtttagtgttacgtgtatgtgagatatgcgaaggatgttttttgagatgggttaattttggttttaattttagtttcggaggttgtatgaatttggttttttttttgggtaggttagtagttggtttgggattttttttgggtgggagagttgatgattggagttttgtgttttagatttagggaaatatagtttttatagtggtttttgtggagaaattagtgaaatttttgaagtttttaaatgagattgaaatgatattagttttaaatttgaatttagttttaaaatttgaattgggatttaatattaatattaattttaatttaaatttaattttaatttaaattataatttaaatttaattttaattgtaattttaattttaaatttaaatatattttaattaataattttttaaataaaattttttttttattttaatttaattttgtttttagggttaattttgaaattagtttattattatttttaatattaaatttaaatttgattttaaatgtaagtttaatttgagttataagtttaaagttgaattttattttgttttatgaattatttatttatttttttatttagtgagtatttgcgtgtttaatatatgttgggtattgttttaaggtaggagggatatggaggtaaagggattagagaaggtattagtatttgtggagtttgtattttagtgaggttagacggaaaagaaagaaattgaagaagaaattggtattatgagaaaataagataggttgatgttgtaagagtggtagggagttatttttaaatatagtagttagtaaaattttttttgagtgtttgggtggtattggagttgagatttaaatgataaaaaatagtgattaggtaaaagtttgggagtaaagtattttaggtaaagggagtagttattgtaaaggttggaaggcggaattaagttgggggtgttgacgataaatagaaggttagtgtggttggagtagagagagagattgggaggcgggtgggagatgaggttagagaggagggtaggggttaggttatgtagggttatgtaagaagggtaaagtttttagattttatttagttataggaagtttttaaaggtcgttagagtgtgtggtgcgtgcgtgtgtgtgtgtgtgtgtgtgtgtgttgtaggggagagagggggagggagagagagagagagagagagaagagggaggtgagtagaggtgattggattttttttttttttgatatggtgttttgttttgtggtttaggttggagtgtagtggtattattatagtttattgtaattttaaaattatgggtttaagttatttttttattttagttttttaagtatttaggattataggtgtgtgttattgtgtttggttaattttaaaaaatattttaaaatttttgttgagatagggtttatgttgtttaggttggtttcgaatttttggttttaagtgatttgtttattttggttttttaaagtttttttttgttagtttgagaggcggtttcgttcgttgtttaggttggagtgtaatgattgattttattttattgtaatttttgttttttgggtttaagcgatttttttgttttagttttttaagtagttgggattataggtgtatgttattattttcggttaattttttgtatttagtagagatggggttttattatgttagttaggttgattttaaatttttgattttaggtgattcgtttgttttagttttttaaagttttgggattataggtgtgagttattatgttgggttagttttttaaagttttgggattataggtatgagttattatattggttttggatttttttttttttttttttttggagacggagttttattttgttgtttaggttggagtgtaatggcgtaattttagtttattgtaatttttgttgttcgggtttaaacgatttttttgttttagttttttgagtagttgggattataggtgtatgttattatgtttggttaatttttgtatttttagtagagaaagtatattattttggttaggttggtttcgaatttttgattttaggtgatttatttgcgtcggttttttaaagtgttgggattataggcgtgagatatcgtatttagttttttttttttttttttttttaagatagaatcgttttgttatttaggttggagtgtagtggtataatttcggtttattgtaatttttgttttttaggtttaagtaatttatttatgttagttttttaagtagttgggattataggtgtatgttattatgtttggttaatttttgtatttttagtatagaaagtatattatgttggttaggttggttttgaatttttgattttaagtgattcgtttgttttagtttttcgaagtgttggaattatagatatgtgttattgtattcggtttggttttttttttttaagagatggagttttatttttttgtttaggttggagtgtaatggtattattatagtttattgtagtttttaatttttggttttaggtaatttttgtattttagtttcgtagtgttgggattataggtatgagttattgagttttgtttggatttttttttttttttgagatggcgtttcgttttgttgtttaggttggagtgttacggtatgattttggtttattgtaatttttattttttaggtttaagcgatttttttgtttcggtttttcgagtagttgggattataggtatgcgttatcgtgtttggttaattttggtatttttagtagagatagggttttattatgttgggtaggttggttttgaatttttgatttcgtgatttatttatttcggttttttaaagtgttgggattataggtatagttaacgcgtttagtttggatttgtttttaaaagattattgtggtttttgtgtttaggttggttggtaggagataggtggtagtggtattgatggtgaagagaaaatagtggtagttatggagatggagagaagtagataagtttgggatatattatatattttaggggtagaaataataggattagatgatggattgatgggtgggagatgtagatattgggagagaagtaggattttgatggatggaaaaattaaaaaattttattttgggtgtggtaagtttaagtttattagatatgtaagtagagatgttattgggtagatatatatttggattttaggggtaaggtttaagttagagaaagaaatttgggtatggttagtatgaggatggtgtttaaagttatggaatttattttgtgtatttttataagatttttttgaggtatttgtttttttttataatggatgtagtgtattttttattttgaattttagaggtaataattttttgtttttagaagttaaattttttagatttagttttttgaatttttattgggatttaatttttttggatttaattttttattttataaggatttttttattaatttattttataatatttggtggaattttttatatttttaaattttgttttttatgtttgaaagtatttttttttgggtattttgaaatttggtttttttttaatgatgttatttttttttgtggtgaaggttgtttttttttcgatttttattattaggggaatgaaggtagaagagaggggtcgttatttttttttttttagattattgataaatttttttttattttttaaagtacgtgttttttgtatttgttatgttttttttgtttttatagtataattttatttattaaaatatttattatgtttttaataatttgtataattagtttagtttttttttatattttatttttattattatttttgtttgtttgttttttgagataaggtattgttttgttatttaggttggagtgtagtggcgtgattttggtttattgtagtttcgattttttgggtttaagtgatttttttacgttagttttttgagtagttaggattataggcgtatattatcgtgttcggttaagttttgtattttttttttttttttagagatagggttttgttatgttgtttaggttggttttgaatttttgagtttaagtaatttattcgttttagttttttaaagtgttgggattataggtatgatttatcgtattcggttttttattattatttttagtgattttaaaagttataaagatcggttgggcgtagtggtttatatttgtaattttagtattttgggaggttgaggcgggtggtttacgaggttaggagatcgagattattttggttaataaggtgaaatttcgtttttattaaaaatataaaaataaaattagttgggcgtggtggtgggtgtttgtagttttagttattcggaaggttgaggcgagagaatggtattaattcgggaggcggattttgtagtgagtttagattatattattgtattttagtttgggtgatagagcgagatttcgttttagaggaaaaaaataaaaataaaaaaagaagttatatagattagatgagttttatagtttggttttttaattttttaagttttttaagtttattggttttatagttttttttttttttttttattttagttatttaggagtaaggttgtattttaaattttagtattatttggaagaattatgtttttaagattttgatttttgaattattttttttattataattatttattttttatattttttattttttgtttttttttgaattagttttttatttttattaagattttcggttgtttttgtttttttggttttgtttgttgatttaatatgtattgtatggttaataattttaattttattttgtttgtattttagaattttttatcgtcgggtatcgtagtttatatttgtaattttagtattttgggaggttaaggtgggcggattatttgaggttaggagttcgagattagttcggttaatgtggtgaagttttatttttattaaaaatataaaaattagttgggcgtgatggtgggtaattgtaattttagttattttggaggttgagggaggagaatcgtttgaattcgggaggtagaggttgtagggaattaagattgagttattgtattttagtttgggtaataagagtgaaattttgttttaaaaattgatttgggtaaattaagtggttttatttttggggttttgttttaggttgttaagcgttgtagtagatagttgagttattataagaggtttataattaattttggttagttaattttagagagttattagtgtttttggatataatttttatttattttttgttgattttttattatattattgtgcgtgatgttttaaattttcgtgtttttgatgttttttatttttatttattaatattttattgagtttaaggttattaagtgtggattttatttttttttttttttttaattttgttatatttaatttttttttatatattgatttatagtatttttttttgtttttaagattgatttttttatttgtattttattttattttttttatttttattatattttttttttattttttgtttatgtttttattattttttttttttttgtttgtttttgggataggtttgttttgttgtttaggttggagtgtagtggcgcgatttcggtttattgtaatttttatttttcgggtttaagtgatttttttgttttagttttttgagtagttggggttataggcgtgtgttattacgtttagttaatttttgtatttttagtaaagatagtattttattatgttggttaggttggttttgaatttttgatatttatagtttgtttattttagttttttaaagcgttgggattataagggtgagttatcgtatttgggttttttttttttttttttttgagattgagtttcgttttgttatttaggttggagtgtagtggtgtgatttcggtttattgtattttttgttttttgagtttaagcgatttttttattttagtgaatagttgggattataggtatgtgttattacgtttggttaatttttgtatttttcgtagagatgcggttttgttatgttggttatattagttttgaatttttggttttaagtgatttgtttattttggttttttatagtgttgggattataggtgtgagttattgtatttggtttatttttgtttttttaagtatttttattttatttttaattttattttttgaaaataaataataaaaaagatttttttttggaatattttttttttaaatgtttagtttattttatttttcgttttcgtgtgatgttttaaaagattagtttttttaacgaattatttttttaggaattggtaaaattttttttaattgtaaaatttgtgggtagaattaagagatgatttttagttattttgtgtttattattttgattttatgtttattatttttttttttttattttttatttattttttaatttatgtaaagtgatttttgtttttttattaaatggaaacggtttttttaaaatttgtaatcgtttagtttttgaatttaataatttttttaatttttatttattagatttttttgaagttttaaatatggttgttttgtttttgtttggtatttttcgtttttcgtgttttgtttttttgattgttttttaattttttttttattggttttttttttttgattatgtttagggtttttttggttatttcgtttttttttttgaagattttgtttatttaaaggtttaatttttattgggaagggaatgatgtttaaatttgtttttttagatttaattttttttgagttttagatttgttttttggaaatttttatttgagagttatgttggtattttaaatttttattgagtattttattattttaagtaggtatatttatatattataattataatgtatagttattatttgtatattgttttattagattgtaagttttatgaaggtagtgattttattatttatatttattgttaagtagtgttttgtttttaataggtgtttaataattttttttttttttggatatagagttttgttttgttatttagattggagagtagaggtatgattttagtttattgtaatttttgtttttcgggtttaagtgatttttgtgttttagatatttgagtagttgggattataggtgtttaagattatatttagttagtttttatatttttagtagagacggggttttattatgttggttaggttggtttcgaatttttggttttaagtgatttttttaaagtgtttttattttggttttttaaagtgttgtgattataggagtgaggtgtttggttattattatttattttttggatagacgttgagaggatttgtggtgttaggaaaagggttggttaatatatagtaggtattaatttataagatgatggtcgtttttttattttttgtttgtattgtagtatttatttgtttttttttttttttatcgttatttggattattgtttataggatgtagtttaatttttgattttgattttttgtggttttttttttattatatgtttttttatatttgtgtttttttttttttaggacgttttttttttagaatatattgtattttttgatttgttaggttcgtttaagacgtgttattcgtttatggaatttttttatttatttttatttagtgaatttatttattagagtaagtttaaatgttgtttttttagaggttttttggatgtttttaaatggatttaattttttttttttttgtaattattttaaagtttatttattatgttttgaattagttaattaggtatgggtttgtttttttattagattgtaagtttgaagtagggtttaaatttatttttgggttatataatgtttagttgatttatattgaatagagttttttttagattttttttttaatttaatttaaatttgttttaatttgagtttttaaattgattttttttaattttattatttttttttaggtttgtttttttaattgaattttaatgtattttttattgagatttaatttttggtgttagttttagagagtagagatatatttttatttatttattgttttatggtaggtattgagttattttttgggaatttttggtttttgtttttgtttttattatgttggataggatgtttgttgtttgttttaaggggttagaggaagttagggtttttagggtttagtatttttattagtttaggaaataagagatatagaagcggaaattatgtggttagagaaagtgaatagtttttattttaggggaatttttattagggttgggggttagatattaggaagggacgttgaaaagattgtggttcggtgggtttaggttttagggtttattttgttttggttttatgtaatttttgtagaaggggaaatgatgtgtttaaaaattagtgagaaattttttgggtggaggagtaaatttggttattagagttttttgtaatttattttttaatttttagtttagggattttaattttaattttttttaaggttaaatttggattttttgtatgttattttcgaaaagttttagtttgtgagaggaatcggacgttagggttatatatagtttgaagttttttttttgaattatagtagtttttttttataggattttttttattagttttttttttttttgtattttgaatatttgtttggttttttagaggttttggtttttttcgaattttaggttgttttatttaaggattttatgtttatttatgttttcgtgtttttagaggcgtgttttttttgttttttattgttttttatttttatttttgggatttttttgtagagaattgggtttaaaatttgaaagataagtttttgattgataagatgttttggtgtaattatgtagatagtgtatttattagtatatgtttgtattttttttgtagttttgttttttttttttgttaagtttttagttgtgttttgggcgatggtagtggggtttatttattttagtttttagggagtttttttttttttttcgtgggaattttagattttttttttattttttaggattttaattattggtttttggaaaaggaaatgtttatagggaaggttatgtttgggttgtttagagatgaatttaggtttaggatggggtagtagttgaatggcggagatgaggattggggttttggaggaagagagatataattgataagttagagggtagagatggatggagttagtagtttggttggttttgggtgtggagttttagttgtttaagaatagataatttatgttatataattttgttttttttattttttttttttgtttttaattttagtaattgaaattttatttttttatagggttttttttttagttattttgtttgtattttttatttttttttagtttttttatggttttttagcgtcggttatttttaattcgtttatttagtgatttagtaaagggaaagttttgtgttgggggaagggggtgttaagtggggaggaggatgtggtttagtttggggagttagggaggggagggaaattggttttgtttttttttttgtttttgttcgtatttatttttttagttatagattgtagggtggataagattttagtgtagggagtggagtgagattggatggtaaattgggtttttttagggttgaattgagggggtatgtagaggttttttgtttttagtttagagttcgtgttagcgtgtgcgtgtgtgttgtaggtgtgtgggagttgtgggttttagtaggcggggcgggaaaggagatgttatgggtgatgaaaattatagtaatggaaaaagatagaggagatattgggagtgagatgtggaattaggttttattaggaaacggtagagttaaggagtagtggtggcggttcgtattttttatttttatttgttataattttcgtttttatttatattttttgttgagtagtatttggtttttttttgtggtttttatttttttttttatttttttttttgttttattttgaggttgtagtttcgaagttttttgttttttttttagggttatttgagggtttttgtatggcgatttagggtttgagaaagggttgttattgtttttattatacggtttagtttttaggttttaatttggtttcggaatcgttgtaggaagcggttagggtgttagcggatttgttggatttttaagtatttttttagagttttttgtttttttaaaggggggtttttggttattagggttgtagttatggtttttgggtttttttttttagggtagggttagggtatattattaaatcgttagaggttgttttttttcgtttttttggggtgtttttttttgggttcggttttggttggtttgggttttcggttttttagagttttttgcgtttttttggttcggtttttacgtagttttttttttttggttcgggttcgttttttgaagagtcgttgtttttttttttgttgtcgttagttttggttggagtttttagtacgtgggggtcgataggatttttttgtttttcgttgttgttgttggtatttttgggtatgttttcgggttaggcgatttgattaggttgagaaggatttaggtttttgggttttatgggaggtattatttgtttgggagggtgggatgggggtagttggagagaggttgtgagaaggtgatgggttttaagaagtagggaagtatagaggagggggtagaggagtttagtgtgacgtatttatgtagatggaaagtagttagtggggaagggtagttgtggatagtagtggattttttatttttaaatttttttatgattttttgttattcgttttttagtttattttggagtttttgtttttattttcgttttttggaggtattatttttttttttttttttagtagaattttaggggggtttttagtttaaaatttggttaggggtttttttatttttattttttatttttatggcggagggatagcggtttagtagcgggaggaagaaatcggtgtaggttgttggtgggagagtagggagtagaagttagttgggatttttatttttcggtagagttgttattttgaattttgttggttatttatttttttggttttaaagtaatggaagggtggtttatatggatgttttttgggtattaggaaataattattattgataaatatagattgatagtttattatatgtatggtaagtgtggtagtttaaaatattttcggttaggcgcggtggtttacgtttgtaattttagtattttgggagttcgaggcgggcggattacgaggttaggagattacgattattttggttaatatggtgaaattttatttttattaaaaaatataaaaaattagttaggtttggtggcgggcgtttgtagttttagttattcggtaggttgaggtaggagaatgatgtgaattcgggaggtggagtttgtagtaagtcgagatcgtgttattgtattttagtttaggtgatagagtaagatttcgttttaaaaaaaaaaaaaaaaaatttttatttgtgtttttataaattattttagtattttagaagttttattatgttaattgatattttttgatttgtttttagttattaaggtagtgtttaaattttttgattatgtattttattttttatttaaaaatattgttattatataaattttttatttttttatttgaaattatatattagattgggaaaatatttgaatgttttattttgggttattaataaatatataaatatgtaatatttattttttattattatttattaataaattgagtaaaataaatgtttttaggggaattttttttagttagttttattaggggatgatgggagaggggtggggaggtgaatcggtaataattatggtcggcggtagagtaagttttttttaaatgattgttgatttagggtaggggaaagggagtggagtgtgatagagggttttatttatgggttgagagaaaataggagaggaatcgacgtttttgaattttttttttttttagttttaattttgttgtatttggtttaaggttagttgagtgttatgttattttttttattgttaatttaggtattttggttaggtttatttgttgtggttattaattattttttttatttgggggatagaagaaggggagggaggtagtttttttttttgtggatttatttttttttttcggggtaagaggaaatgggttagtagtttttaaatttttatttggtagtgttggaaagtattgtttatttggtagaaagttggaataggggaaggtaaggttaggaaggtaagaagatagaatggtttaggtgtggttggcgaaggtttattatttttatttaaattatattagggttggtgggggggggtatttttttttagtgttgttgtgatttgttatagatttttttaatttgttttatttagaaagtatttggttttgttttttattcgtttgttttttatttgagtttaggtggtgagtatggtgagtgtttaggtttgtatgggaggtttatatttataggttttaaggagtagggtttttaattataaaaatataatattaaatagttattataattgaggtatgtgtttgaaaaaagttggttataaaattgtagagaggattagatgtggttaggtacggtggtttacgtttgtaattttagtattttgggaggttgggggggggggataatggattataaggttaggagtttaatattagtttggttaagatggtgaaaattcgtttttattaaaataaataaataaaatatatatataattatattttatattatatataaaattagttaggcgtggtggttgacgtttgtaattttagttatttgggaggttgaggtagagaattgtttgaatttgggaggcggaggttgtagtgagtcgagatcgcgtttttgtattttagtttgggtgatagggtgagattttattttaaaaaaaaaaaaaaaaaaaaaaaagagagagagagagaggattagataataattgtttaaaataagagattaaattttatggttggaaaaaaagaggtcgggcgtggtggtttatggtttgtaattttagtattttgggaggttgaggcgggtggattatttgaggttaggagttcgagattagtttggttaatatggtgaaattttgtttttattaaaaatataaaaattagttaggcgtggtagtatgtgtttgtaattttagttatttgggaggttgagttaggagaattatttgaatttggaaggtagaggttgtagtgagttgagattatgttagtgtattttagtttgggtaatagagggagatttttattttaaaaaaaaaaaaaaaaaaagaaaaaaaatagattggtaaaaaatatgtaaaaattttagtttatgggtggtggggttgtaggtggttttttttttaattttatttgatattttaatgtgaaagggatataattaagttgaaattttttttttaaagaaggacgaataaatttgataattattaatagtgtattgtgattttttttagttttattttggtgtatttaaaagtatatatatgatatatttatttggagatatgtaattatattataaatattgtttggtaatttgttttttttatttaatattttatttatatttttttataggaatatatatagtttattttatattttttgacgattttataattagtgttttattgtgtgtataaaataaatttttttattttaatatcgatagattttgttttaaaaaatgtttagttttatgagtattttatagtttttttgtgggggtagatttttataagtggaatttttgagttaaaggatatgcgtaatttggttaaattgtttttaataagtttgtgttaatatataagtgtgtttatgtttttttttattaaaattgaatattattaatttttttaattttgttagttggatagattaaaaaattattttattaataatgttttttttttttttatgttttttggttatttgtattttttgtgaatgaattgtttatattttttatttattttttttttggaaattatatatattgatatgagggttttatatattgtatgtgttatatatattgtaaatatttttttttatttatttttaaaaaagttttttttttttttttgagataaggttttattttgttgtttaggttgtagtgcggtggtatgattttgtttattgtaaattttgttttatttgggtttaagcgatttttttattttagttttttgagtaattgggattataggacgatagttacgtattattacgtttggttaattttgtattttttgtatagattaggttttattgtgttgtttaggttggttttgaatttttggtttaagtgatttgtttattttggtattttaaagtgtgggattataggtgtgagttatcgtattcggtttaaaatttttatgtagttaaatttatattaatatattattttttgattttttattttattttatttttaggaaggttttattttaagattataaaatattttttgtatttttttttattattttagatgtatatttatttttatttttagaaattaaaaaattcggttaggcgcggtggtttatgtttgtaattttagtattttgggagtttaaggtgggtggattatgaggttaggagtttaagattagtttggttaagatggtgaaatttcgtttttattaaaaatataaaaattagtttgacgtggtggcggatgtttgtaattttagttatttgggaggttgaggtagagaattgtttgaattcgggaggtagaggttgtagtgagttaagattgcgcgattggattttagtttgggtgatagagtgagattttgttttaataataataaaaaagaaattaaaaaatttttaaaaatataaagtataatataatatataattttatttttattatagggtttgttaatgtattgttatgtttgtagtataatttattttaaggaaataaaattattatagataaaggtagtttatcgtgatatcgttttttaagttttatttttttttaggttatttgttttatgaatttggtgtgtatttttttgttatatttaggtatttaatttgttggaatttattttttgattaggtgtgaggtgggatttttgtttttttttagatgagttaaatgttttaatattatttataaaatagtttatttggttaggtatagtggtttatgtttgtaattttagtattttgggaagttgaggtgggtggattattttaggttaggataggagtttaagattagtttggttaatacggtgaaatttttatttttataaaaatataaaaattagttgggtatgatggtaggtgtttagttatttaggaggttgaggtaggagaattgtttgaattcgggaggcggaggttgtagtaagttgagattgcgttattgtattttagtttgggtgatatagcgagattttgtttcggaaaaaaaaaaaaaaaaaagtttatttttttttagtattagaaatgttttttttaggtttggcgcggtggtttacgtttttaattttagtattttgggaggtcgaggcgggcggattatgaggttaggagttcgagattagtttggttaatatagtgaaattttgtttttattaaaaatataaaaaattagttgggcgtggtggcgggcgtttgtaattttagttatttgggaggttgaggtaggagaatggtttgaatttgggaagcggagtttgtagtgagtcgagattatattattgtattttagtttgggcgatagaatgagattttattttttatttcgttaaaaaaaaaaaaaaaaaaaaaaaaaaagaaatgtcgtttttatagcgatttattagattaatcgtttttaatgttttttaatacgttggagttttatattaagaaaaataaatataaaaatattttggttaggcgttgtggtttacgtttgtaattttaatattttgggaggttgaggtgagtagattataaggttaagagatcgagattattttggttaatatggtgaaatttcgtgtttattaaaaatataaaaaattagttaggcgtggtggtatacgtttatagtttttacgtttatagttttagttatttgggaggttgaggtaggagaattttttgaatttgggaggtggaggttgtagtgagtcgagattgtgttattgtattttagtttgggcgatagaatgagatttttttttaaataaaataaaataaaataaaatagaaaataaaaataaaattaaaagatattttgtgggatgggtacggtggtttatgtttataattttaatattttgggaggttgaggtgggtggattatttgaggttaggagtttgagattagtttggttaatatgttgaaattttatttttattaaaaatataaaaattaggtcgggtatggtggtttatgtttgtaattttagtattttgggaggtcgaggtaggtggattatttaaggttaggagttcgagagtagtttggttaatatggtgaaattttatttttattaaaaatataaaagttagtcgggtatggtggtaggtttttgtagtttcggttatttaggaggttgaggaaggagaattatttgaatttaggaggcggaggtggtagtgagttaagatattgttattgtattttagtttggggaatagagggagatttcgttttaaaaataaataaataaataaaaatttaaaaattaataaataaaaataaaaaaattagttgggtatggtggtgtgtgtttgtaattttagttatttgggaggttgaagtaggagaatcgtttgaatttaggaagtagaagttatagtgagtcgagattatgttattgtattttagtttgggcgataaagtaagatttcgttttaaaaggaaaagaaaaaggaagttggaagttgaatgagatgggttttttaattaaggagttagaaggttatttggtggtagggttggtagaggattaggagtaaataaggttagagaggatattagggtttgggagtgaaggtattgagtttgggtttttttttggaagataatgatttgagagttgtgagattttagataagttttcgaattttttgggttttgttttttttatttgtaaatgggataatattagttttattagttttttaaaatttaatataatggagttgggtgtggtggtttacgtttttagtttcggtattttgggaagtcgaggtgggtagattgtttgaatttaggagatgtagaatagtttggataatatagtaaaatagtttttattaaaaatataaataattagttgggtatggtggtgtgtgtttgtagttttagttattagggaggttgaggtgggaggattgtttgagtttacgaggtagaggttgtagt
